(19) United States
(12) Patent Application Publication
(10) Pub. No.: US 2024/0141384 A1
(43) Pub. Date: May 2, 2024

(54) METHODS AND COMPOSITIONS TO CONFER REGULATION TO GENE THERAPY CARGOES BY HETEROLOGOUS USE OF ALTERNATIVE SPLICING CASSETTES

(71) Applicant: University of Florida Research Foundation, Incoporated, Gainesville, FL (US)

(72) Inventors: Eric Tzy-Shi Wang, Gainesville, FL (US); Keril K. Poukalov, Gainesville, FL (US)

(73) Assignee: University of Florida Research Foundation, Incoporated, Gainesville, FL (US)

(21) Appl. No.: 18/277,969

(22) PCT Filed: Feb. 18, 2022
(86) PCT No.: PCT/US2022/017015

§ 371 Date: Aug. 18, 2023

Related U.S. Application Data
(60) Provisional application No. 63/151,402, filed on Feb. 19, 2021.

(51) Int. Cl. C12N 15/861; A61K 48/00

(52) U.S. Cl. CPC C12N 15/861; A61K 48/0058; C12N 2750/14143; C12N 2830/008; C12N 2840/44

(57) ABSTRACT

Provided herein, in some embodiments, are nucleic acid constructs encoding therapeutic proteins of interest comprising one or more alternatively-spliced exons that regulate the expression of therapeutic proteins of interest. Such constructs may in some embodiments be useful for delivery in a recombinant viral vector.

### RELATED APPLICATIONS

[0001] This application claims the benefit under 35 U.S.C. § 119(e) of the filing date of U.S. Provisional Application Ser. No. 63/151,402, filed Feb. 19, 2021, entitled “METHODS AND COMPOSITIONS TO CONFER REGULATION TO GENE THERAPY CARGOES BY HETEROLOGOUS USE OF ALTERNATIVE SPLICING CASSETTES”, the entire content of which is incorporated herein by reference in its entirety.

### SEQUENCE LISTING

[0002] In accordance with 37 C.F.R. 1.52(e)(5), the present specification makes reference to a Sequence Listing (submitted electronically as a .txt file named “U119670085WO00-SEQ-KSB”). The .txt file was generated on Feb. 15, 2022 and is 1,016,464 bytes in size. The Sequence Listing is herein incorporated by reference in its entirety.

### BACKGROUND

[0003] Recombinant viruses (e.g., recombinant adeno-associated viruses (AAV) and recombinant lentiviruses, etc.) can be used to express therapeutic proteins (i.e., therapeutic cargoes) in patients as a form of genetic therapy. Such therapies seeking to deliver a protein cargo commonly package a recombinant virus genome comprising a coding region of interest along with a 5′ untranslated region, 3′ untranslated region, a promoter that will drive the gene of interest, and, sometimes, a constitutive intron to enhance nuclear export and RNA stability. However, most promoter elements are not able to deliver the therapeutic cargo consistently and reliably in conditions of interest (e.g., a specific tissue, a specific cellular environment, etc.).

[0004] New approaches relating to the use of recombinant viruses for delivering therapeutic cargo consistently and reliably in conditions of interest would be an advance in the art.

### SUMMARY OF THE INVENTION

[0005] The present disclosure relates to the observation that alternatively-spliced exons may be used in the context of viral vectors (e.g., AAV viral vectors or lentivirus viral vectors) to effectively regulate the expression of a coding region of interest (e.g., a coding region of a transgene that encodes a therapeutic protein). In certain embodiments, the alternatively-spliced exons regulate a coding region of interest in a condition-sensitive manner. As used herein, “condition-sensitive manner” means that the alternatively-spliced exon regulates the expression of a coding region of interest in a manner that is controlled or influenced by one or more conditions, including, but not limited to, environmental conditions, intracellular conditions, extracellular conditions, type of cell (e.g., liver versus kidney cell), gene expression pattern, or disease state. Accordingly, the present disclosure relates to a new approach for regulating expression of a coding region of interest (e.g., a coding region of a transgene that encodes a therapeutic protein) from recombinant viral vectors, optionally in a condition-sensitive manner, by coupling the expression of a coding region of interest with an alternatively-spliced exon. The present disclosure describes a variety of exemplary configurations and methods of coupling the expression of a coding region of interest (or multiple portions of coding regions) with an alternatively-spliced exon, but any suitable arrangement or configuration is contemplated so long as the expression of the coding region of interest (e.g., a coding region of a transgene that encodes a therapeutic protein) is configured to come under regulatory control of an alternatively-spliced exon.

[0006] The present disclosure further relates to the following embodiments.

[0007] Aspects of the invention relate to a recombinant viral genome capable of delivering (e.g., expressing) a transgene or coding region thereof in a subject, wherein said recombinant viral genome comprises at least one alternatively-spliced exon and a coding region of the transgene. In various aspects, the alternatively-spliced exon undergoes differential splicing in a condition-sensitive manner to result in different spliced transcripts (e.g., mRNA isoforms), whereby the alternatively-spliced exon has been either retained (“spliced in”) or not retained (“spliced-out”) in the resulting spliced transcripts. For example, in a healthy cell environment, the alternatively-spliced exon may be spliced-out of the resulting transcript; however, in a cancer cell, the alternatively-spliced exon may be spliced-in the resulting transcript. And, depending upon the regulatory sequences present in the alternatively-spliced exon, and whether those regulatory sequences impart a positive or negative regulatory control on the expression of the coding region of interest, the alternatively-spliced exon regulates the expression of the coding region of interest by virtue of being either present (spliced-in) or not present (spliced-out) in the resulting mRNA transcript isoform.

[0008] In some embodiments, the alternatively-spliced exon may be provided in the form of a transgene comprising the alternatively-spliced exon, one or more introns (or portion(s) thereof), and one or more additional exons (e.g., constitutive exons). Such transgenes comprising an alternatively-spliced exon may be referred to herein as comprising an “alternatively-spliced exon cassettes.” The configuration of the alternatively-spliced exon cassettes and transgenes is not limited in any way, and examples of such configurations are provided in the Figures.

[0009] In some embodiments, the transgene comprises an alternatively-spliced exon, one or more introns (or portion(s) thereof) and one or more exons. In various embodiments, the one or more exons can be constitutive exons (i.e., those that are retained in all mRNA isoforms resulting from splicing). In certain embodiments, the transgene or the alternatively-spliced exon cassette comprises one intron (or portion thereof). In some embodiments, the intron (or portion thereof) is located 3′ or 5′ to an alternatively-spliced exon. In other embodiments, the transgene or the alternatively-spliced exon cassette comprises two introns (or portion(s) thereof) (e.g., whereby the one or more introns are flanking introns, i.e., introns that are immediately upstream or downstream of the alternatively-spliced exon).

[0010] In some embodiments, an alternative exon cassette comprises a polynucleotide having at least 70%, at least 75%, at least 80%, at least 90%, at least 92%, at least 95%, at least 98%, or at least 99% sequence identity, relative to a nucleic acid sequence as set forth in any one of SEQ ID NOs: 107-778. In some embodiments, an alternative exon cassette comprises a polynucleotide having a nucleic acid sequence as set forth in any one of SEQ ID NOs: 107-778.

[0011] In some embodiments, the alternatively-spliced exon comprises at least one modification, relative to a naturally occurring alternatively-spliced exon. In some embodiments, the alternatively-spliced exon comprises at its 3′ end a heterologous start codon or part of a heterologous start codon. In some embodiments, all native start codons located 5′ to the heterologous start codon are disrupted or deleted.

[0012] In some embodiments, the alternatively-spliced exon is located 5′ to the coding region of the transgene. In some embodiments, the alternatively-spliced exon cassette comprises two alternatively-spliced exons, each with flanking introns. In some embodiments, the two alternatively-spliced exons are adjacent. In some embodiments, the constitutive exon is located 5′ to the two alternatively-spliced exons.

[0013] In some embodiments, each alternatively-spliced exon comprises at its 3′ end a heterologous start codon or part of a heterologous start codon. In some embodiments, all native start codons located 5′ to the heterologous start codon of the 5′-most alternatively-spliced exon are disrupted or deleted.

[0014] In some embodiments, only one of the two alternatively-spliced exons is retained in the spliced transcript. In some embodiments, the 5′-most alternatively-spliced exon is retained in the spliced transcript. In some embodiments, the 3′-most alternatively-spliced exon is retained in the spliced transcript.

[0015] In some embodiments, the alternatively-spliced exon(s) and flanking intron(s) are located within the coding region of the transgene.

[0016] In some embodiments, the alternatively-spliced exon comprises a heterologous, in-frame stop codon. In some embodiments, the heterologous, in-frame stop codon is at least 50 nucleotides upstream of the next 5′ splice junction. In some embodiments, the heterologous stop codon elicits nonsense-mediated decay.

[0017] In various embodiments, the alternatively-spliced exon is spliced-in or retained in the presence of one or more conditions (i.e., in a condition-sensitive manner) to result in an mRNA isoform comprising the alternatively-spliced exon and a coding region of interest. In some embodiments, the one or more conditions comprise the conditions that define one cell type from another. In other embodiments, the one or more conditions comprise the intracellular conditions that define a healthy cell state from a diseased cell state. In some embodiments, the one or more conditions comprise the presence or absence of activated T cells and/or the presence or absence of a state of inflammation. In still other embodiments, the one or more conditions comprise one or more signs or symptoms of a disease state, and/or the presence or absence of one or more disease markers. In still other embodiments, the one or more conditions comprise the expression level and/or activity of the endogenous protein that corresponds to the protein encoded by the coding region of interest in the alternatively-spliced exon cassette of the recombinant virus genome. For example, in one embodiment, if the endogenous protein has a low level of expression and/or activity (e.g., due to a defective naturally occurring gene encoding the endogenous protein), the alternatively-spliced exon may be spliced-in, and the coding region of interest may be upregulated (e.g., if the alternatively-spliced exon comprises a positive regulatory sequence). In another embodiment, if the endogenous protein has a low level of expression and/or activity (e.g., due to a defective naturally occurring gene encoding the endogenous protein), the alternatively-spliced exon may be spliced-in, and the coding region of interest may be downregulated (e.g., if the alternatively-spliced exon comprises a negative regulatory sequence). In still other embodiments, if the endogenous protein has a low level of expression and/or activity (e.g., due to a defective naturally occurring gene encoding the endogenous protein), the alternatively-spliced exon may be spliced-out, and the coding region of interest may be upregulated (e.g., if the alternatively-spliced exon comprises a negative regulatory sequence that is removed by the splicing-out of the exon). In another embodiment, if the endogenous protein has a low level of expression and/or activity (e.g., due to a defective naturally occurring gene encoding the endogenous protein), the alternatively-spliced exon may be spliced-out, and the coding region of interest may be downregulated (e.g., if the alternatively-spliced exon comprises a positive regulatory sequence that is removed by the splicing-out of the exon).

[0018] In various embodiments, the one or more conditions (e.g., environmental, intracellular, disease state, cell type, expression pattern, etc.) may result in the splicing-in or splicing-out of the alternatively-spliced exon. For example, the one or more conditions may cause the alternatively-spliced exon to be spliced-in, and the coding region of interest may be upregulated (e.g., if the alternatively-spliced exon comprises a positive regulatory sequence). In another embodiment, the one or more conditions may cause the alternatively-spliced exon to be spliced-in, and the coding region of interest may be downregulated (e.g., if the alternatively-spliced exon comprises a negative regulatory sequence). In still other embodiments, the one or more conditions may cause the alternatively-spliced exon to be spliced-out, and the coding region of interest may be upregulated (e.g., if the alternatively-spliced exon comprises a negative regulatory sequence that is removed by the splicing-out of the exon). In another embodiment, the one or more conditions may cause the alternatively-spliced exon to be spliced-out, and the coding region of interest may be downregulated (e.g., if the alternatively-spliced exon comprises a positive regulatory sequence that is removed by the splicing-out of the exon).

[0019] In some embodiments, the alternatively-spliced exon comprises an alternatively-spliced exon from a gene selected from the group consisting of: ABCC1, AK125149, ASCC2, BAT2D1, BBX, BRD8, BRE, C17orf70, CAMKK2, CBFB, CCAR1, CCDC7CD6, CHTF8, COL4A3BP, COL6A3, CUGBP1, CUGBP2, CXorf45, DENND3, DGUOK, DKFZp762G094, DNAJC7, DNASE1, EIF4A2, EIF4G2, EIF4H, EXOC7, EZH2, FAM120A, FAM136A, FAM36A, FARSB, FBXO38, FGFR1OP2, FIP1L1, FOXRED1, FUBP3, GALT, GATA3, GOLGA2, HIF1A, HMMR, HRB, IKZF1, ILF3, IRAK4, IRF1, KCTD13, LEF1, LUC7L, LYRM1, MALT1 e7, MAP2K7, MAP3K7, MAP4K2, MBNL2, MFF, NAE1, NCSTN, NR4A3, NRF1, NUP98, PARP6, PCM1, PLAUR, PLSCR3, PPIL5, PPP5C, PTPRC-E4, PTPRC-E6, PTS, RABL5, RAPH1, SEC16A, SFRS3, SFRS7, SLMAP, SNRNP70, STAT6, TBC1D1, TIMM8B, TIR8, TRA2A, TROVE2, UGCGL1, VAP-B, VAV1, ZNF384, ZNF496, CAMK2B, PKP2, LGMN, NRAP, VPS39, KSR1, PDLIM3, BIN1, ARFGAP2, KIF13A, and/or PICALM. In some embodiments, the alternatively-spliced exon comprises an alternatively-spliced exon from or derived from an alternatively-spliced exon of a gene selected from the group consisting of CAMK2B, PKP2, LGMN, NRAP, VPS39, KSR1, PDLIM3, BIN1, ARFGAP2, KIF13A, and/or PICALM. In some embodiments, the alternatively-spliced exon is or is derived from an alternatively-spliced exon of CAMK2B. In some embodiments, the alternatively-spliced exon is or is derived from an alternatively-spliced exon of PKP2. In some embodiments, the alternatively-spliced exon is or is derived from an alternatively-spliced exon of LGMN. In some embodiments, the alternatively-spliced exon is or is derived from an alternatively-spliced exon of NRAP. In some embodiments, the alternatively-spliced exon is or is derived from an alternatively-spliced exon of VPS39. In some embodiments, the alternatively-spliced exon is or is derived from an alternatively-spliced exon of KSR1. In some embodiments, the alternatively-spliced exon is or is derived from an alternatively-spliced exon of PDLIM3. In some embodiments, the alternatively-spliced exon is or is derived from an alternatively-spliced exon of BIN1. In some embodiments, the alternatively-spliced exon is or is derived from an alternatively-spliced exon of ARFGAP2. In some embodiments, the alternatively-spliced exon is or is derived from an alternatively-spliced exon of KIF13A. In some embodiments, the alternatively-spliced exon is or is derived from an alternatively-spliced exon of PICALM.

[0020] In some embodiments, the alternatively-spliced exon is or is derived from exon 11 of BIN1. In some embodiments, the alternatively-spliced exon which is or is derived from exon 11 of BIN1 comprises a polynucleotide having at least 70%, at least 75%, at least 80%, at least 90%, at least 92%, at least 95%, at least 98%, or at least 99% sequence identity, relative to a nucleic acid sequence as set forth in SEQ ID NO: 37. In some embodiments, the alternatively-spliced exon which is or is derived from exon 11 of BIN1 comprises a polynucleotide having a nucleic acid sequence as set forth in SEQ ID NO: 37. In some embodiments, the alternatively-spliced exon which is or is derived from exon 11 of BIN1 comprises a polynucleotide having at least 70%, at least 75%, at least 80%, at least 90%, at least 92%, at least 95%, at least 98%, or at least 99% sequence identity, relative to a nucleic acid sequence as set forth in SEQ ID NO: 38. In some embodiments, the alternatively-spliced exon which is or is derived from exon 11 of BIN1 comprises a polynucleotide having a nucleic acid sequence as set forth in SEQ ID NO: 38.

[0021] In some embodiments, a component (e.g., an alternative exon; an intronic sequence) which is “derived from” a gene (e.g., BIN1, SMN1) may be derived from the gene in that the component is taken from its wild-type or natural context and put into a non-natural context (e.g., inserted into the nucleic acid sequence of a transgene), but may comprise the wild-type or natural nucleic acid sequence of said component. In some embodiments, a component (e.g., an alternative exon; an intronic sequence) which is “derived from” a gene (e.g., BIN1, SMN1) may be derived from the gene in that the component is taken from its wild-type or natural context and put into a non-natural context (e.g., inserted into the nucleic acid sequence of a transgene), and may also be derived from the gene in that the nucleic acid sequence of the component is modified, relative to the wild-type or natural nucleic acid sequence of said component. Modifications to the various components (e.g., introns, exons, etc.) are described elsewhere herein.

[0022] In some embodiments, the alternatively-spliced exon comprises an alternatively-spliced exon comprising a polynucleotide sequence as set forth in any one of SEQ ID NOs: 23-44.

[0023] In some embodiments, the flanking intron(s) (or portion(s) thereof) is a native flanking intron(s) (or portion(s) thereof) of the alternatively-spliced exon(s). In some embodiments, the flanking intron(s) (or portion(s) thereof) comprises at its 5′ end a 5′ splice donor site. In some embodiments, the flanking intron(s) (or portion(s) thereof) comprises at its 3′ end a 3′ splice donor site. In some embodiments, the flanking intron(s) (or portion(s) thereof) comprises no modifications, relative to a naturally occurring intron (or portion thereof). In some embodiments, the flanking intron(s) (or portion(s) thereof) comprises at least one modification, relative to a naturally occurring intron (or portion thereof). In some embodiments, the modification is a substitution or deletion of one or more nucleotides. In some embodiments, the flanking intron(s) (or portion(s) thereof) is a regulated intron (or portion thereof).

[0024] In some embodiments, the flanking intron(s) is or is derived from an intron of a gene selected from the group consisting of ABCC1, AK125149, ASCC2, BAT2D1, BBX, BRD8, BRE, C17orf70, CAMKK2, CBFB, CCAR1, CCDC7CD6, CHTF8, COL4A3BP, COL6A3, CUGBP1, CUGBP2, CXorf45, DENND3, DGUOK, DKFZp762G094, DNAJC7, DNASE1, EIF4A2, EIF4G2, EIF4H, EXOC7, EZH2, FAM120A, FAM136A, FAM36A, FARSB, FBXO38, FGFR1OP2, FIP1L1, FOXRED1, FUBP3, GALT, GATA3, GOLGA2, HIF1A, HMMR, HRB, IKZF1, ILF3, IRAK4, IRF1, KCTD13, LEF1, LUC7L, LYRM1, MALT1 e7, MAP2K7, MAP3K7, MAP4K2, MBNL2, MFF, NAE1, NCSTN, NR4A3, NRF1, NUP98, PARP6, PCM1, PLAUR, PLSCR3, PPIL5, PPP5C, PTPRC-E4, PTPRC-E6, PTS, RABL5, RAPH1, SEC16A, SFRS3, SFRS7, SLMAP, SMN1, SNRNP70, STAT6, TBC1D1, TIMM8B, TIR8, TRA2A, TROVE2, UGCGL1, VAP-B, VAV1, ZNF384, ZNF496, CAMK2B, PKP2, LGMN, NRAP, VPS39, KSR1, PDLIM3, BIN1, ARFGAP2, KIF13A, and/or PICALM.

[0025] In some embodiments, the flanking intron(s) is or is derived from an intron of SMN1. In some embodiments, the flanking intron(s) which is or is derived from an intron of SMN1 flanks a constitutive exon. In some embodiments, the flanking intron(s) is or is derived from intron 6 and/or intron 7 of SMN1. In some embodiments, the flanking intron which is derived from SMN1 intron 6 is a fragment of (e.g., is truncated relative to) the wild-type or naturally occurring sequence of SMN1 intron 6. In some embodiments, the flanking intron which is derived from SMN1 intron 6 comprises a polynucleotide having a nucleic acid sequence as set forth in SEQ ID NO: 103. In some embodiments, the flanking intron which is derived from SMN1 intron 6 comprises a polynucleotide having at least 70%, at least 75%, at least 80%, at least 90%, at least 92%, at least 95%, at least 98%, or at least 99% sequence identity, relative to a nucleic acid sequence as set forth in SEQ ID NO: 103. In some embodiments, the flanking intron which is derived from SMN1 intron 7 is a fragment of (e.g., is truncated relative to) the wild-type or naturally occurring sequence of SMN1 intron 7. In some embodiments, the flanking intron which is derived from SMN1 intron 7 comprises a polynucleotide having a nucleic acid sequence as set forth in SEQ ID NO: 104. In some embodiments, the flanking intron which is derived from SMN1 intron 7 comprises a polynucleotide having at least 70%, at least 75%, at least 80%, at least 90%, at least 92%, at least 95%, at least 98%, or at least 99% sequence identity, relative to a nucleic acid sequence as set forth in SEQ ID NO: 104.

[0026] In some embodiments, the flanking intron(s) is or is derived from an intron of BIN1. In some embodiments, the flanking intron(s) which is or is derived from an intron of BIN1 flanks an alternative exon. In some embodiments, the flanking intron(s) is or is derived from intron 10 and/or intron 11 of BIN1. In some embodiments, the flanking intron(s) which is or is derived from intron 10 of BIN1 comprises a polynucleotide having at least 70%, at least 75%, at least 80%, at least 90%, at least 92%, at least 95%, at least 98%, or at least 99% sequence identity, relative to a nucleic acid sequence as set forth in SEQ ID NO: 15. In some embodiments, the flanking intron(s) which is or is derived from intron 10 of BIN1 comprises a polynucleotide having a nucleic acid sequence as set forth in SEQ ID NO: 15. In some embodiments, the flanking intron(s) which is or is derived from intron 11 of BIN1 comprises a polynucleotide having at least 70%, at least 75%, at least 80%, at least 90%, at least 92%, at least 95%, at least 98%, or at least 99% sequence identity, relative to a nucleic acid sequence as set forth in SEQ ID NO: 16. In some embodiments, the flanking intron(s) which is or is derived from intron 11 of BIN1 comprises a polynucleotide having a nucleic acid sequence as set forth in SEQ ID NO: 16.

[0027] In some embodiments, the flanking intron(s) comprises an intron comprising a polynucleotide sequence as set forth in any one of SEQ ID NOs: 1-22, 103, and 104.

[0028] In some embodiments, the constitutive exon is an exon which is natively associated with the coding region of the transgene. In some embodiments, the constitutive exon is not a exon which is natively associated with the coding region of the transgene. In some embodiments, the constitutive exon is or is derived from the same gene as the alternatively-spliced exon(s). In some embodiments, the gene is the gene from which the coding region of the transgene is also derived. In some embodiments, the constitutive exon is not from or derived from the same gene as the alternatively-spliced exon(s).

[0029] In some embodiments, the coding region of the transgene is or is derived from a coding region of a gene selected from the group consisting of MBNL1, MBNL2, MBNL3, hnRNP A1, hnRNP A2B1, hnRNP C, hnRNP D, hnRNP DL, hnRNP F, hnRNP H, hnRNP K, hnRNP L, hnRNP M, hnRNP R, hnRNP U, FUS, TDP43, PABPN1, ATXN2, TAF15, EWSR1, MATR3, TIA1, FMRP, MTM1, MTMR2, LAMP2, KIF5A, a microdystrophin-encoding gene, C9ORF72, HTT, DNM2, BIN1, RYR1, NEB, ACTA, TPM3, TPM2, TNNT2, CFL2, KBTBD13, KLHL40, KLHL41, LMOD3, MYPN, SEPN1, TTN, SPEG, MYH7, TK2, POLG1, GAA, AGL, PYGM, SLC22A5, OCTN2, ETF, ETFH, PNPLA2, a cytochrome b oxidase-encoding gene, a cytochrome c oxidase-encoding gene, CLCN1, SCN4A, DMPK, CNBP, MYOT, LMNA, CAV3, DNAJB6, DES, TNPO3, HNRPDL, CAPN3, DYSF, an alpha-sarcoglycan-encoding gene, a beta-sarcoglycan-encoding gene, a gamma-sarcoglycan-encoding gene, a delta-sarcoglycan-encoding gene, TCAP, TRIM32, FKRP, FXN, POMT1, FKTN, POMT2, POMGnT1, DAG1, ANO5, PLEC1, TRAPPC11, GMPPB, ISPD, LIMS2, POPDC1, TOR1AIP1, POGLUT2, LAMA2, COL6A1, POMT1, POMT2, DUX4, EMD, PAX7, PMP22, MPZ, MFN2, SMCHD1, SMN, Lamin A/C (LAMN), GJB1, ABCC1, AK125149, ASCC2, BAT2D1, BBX, BRD8, BRE, C17orf70, CAMKK2, CBFB, CCAR1, CCDC7CD6, CHTF8, COL4A3BP, COL6A3, CUGBP1, CUGBP2, CXorf45, DENND3, DGUOK, DKFZp762G094, DNAJC7, DNASE1, EIF4A2, EIF4G2, EIF4H, EXOC7, EZH2, FAM120A, FAM136A, FAM36A, FARSB, FBXO38, FGFR1OP2, FIP1L1, FOXRED1, FUBP3, GALT, GATA3, GOLGA2, HIF1A, HMMR, HRB, IKZF1, ILF3, IRAK4, IRF1, KCTD13, LEF1, LUC7L, LYRM1, MALT1 e7, MAP2K7, MAP3K7, MAP4K2, MBNL2, MFF, NAE1, NCSTN, NR4A3, NRF1, NUP98, PARP6, PCM1, PLAUR, PLSCR3, PPIL5, PPP5C, PTPRC-E4, PTPRC-E6, PTS, RABL5, RAPH1, SEC16A, SFRS3, SFRS7, SLMAP, SNRNP70, STAT6, TBC1D1, TIMM8B, TIR8, TRA2A, TROVE2, UGCGL1, VAP-B, VAV1, ZNF384, ZNF496, CAMK2B, PKP2, LGMN, NRAP, VPS39, KSR1, PDLIM3, BIN1, ARFGAP2, KIF13A, and/or PICALM. In some embodiments, the coding region of the transgene is or is derived from MTM1, CAPN3, or FXN. In some embodiments, the coding region of the transgene is or is derived from FXN.

[0030] In some embodiments, the coding region of the transgene is or is derived from MTM1. In some embodiments, the coding region of the transgene which is or is derived from MTM1 comprises a polynucleotide having at least 70%, at least 75%, at least 80%, at least 90%, at least 92%, at least 95%, at least 98%, or at least 99% sequence identity, relative to a nucleic acid sequence as set forth in SEQ ID NO: 1881. In some embodiments, the coding region of the transgene which is or is derived from MTM1 comprises a polynucleotide having a nucleic acid sequence as set forth in SEQ ID NO: 1881.

[0031] In some embodiments, the coding region of the transgene is or is derived from CAPN3. In some embodiments, the coding region of the transgene which is or is derived from CAPN3 comprises a polynucleotide having at least 70%, at least 75%, at least 80%, at least 90%, at least 92%, at least 95%, at least 98%, or at least 99% sequence identity, relative to a nucleic acid sequence as set forth in SEQ ID NO: 1882. In some embodiments, the coding region of the transgene which is or is derived from CAPN3 comprises a polynucleotide having a nucleic acid sequence as set forth in SEQ ID NO: 1882.

[0032] In some embodiments, a recombinant viral genome of the present disclosure further comprises a promoter. In some embodiments, the promoter is a native promoter of the coding region of the transgene. In some embodiments, the promoter is not a native promoter of the coding region of the transgene. In some embodiments, the promoter is constitutive. In some embodiments, the promoter is inducible. In some embodiments, the promoter is a cell-specific promoter. In some embodiments, the promoter is a tissue-specific promoter. In some embodiments, the promoter is selected from the group consisting of an EF1 alpha promoter, beta actin promoter, CMV, muscle creatine kinase promoter, C5-12 muscle promoter, MHCK7, CBh, synapsin, MECP2, enolase, GFAP, Desmin, and CAG promoter.

[0033] In some embodiments, the promoter is an MHCK7 promoter. In some embodiments, an MHCK7 promoter comprises a polynucleotide having at least 70%, at least 75%, at least 80%, at least 90%, at least 92%, at least 95%, at least 98%, or at least 99% sequence identity, relative to a nucleic acid sequence as set forth in SEQ ID NO: 1880. In some embodiments, an MHCK7 promoter comprises a polynucleotide having a nucleic acid sequence as set forth in SEQ ID NO: 1880.

[0034] In some embodiments, the promoter drives expression of the transgene (e.g., expression of the product encoded by the coding region of interest). In some embodiments, the promoter is a ubiquitous promoter. In some embodiments, a ubiquitous promoter is a promoter selected from the group consisting of: an EF1 alpha promoter, a beta actin promoter, CMV, CBh, and CAG promoter. In some embodiments, the promoter is a tissue-specific promoter, such as a muscle- or heart-biased promoter. In some embodiments, a tissue-specific promoter, such as a muscle- or heart-biased promoter, is a promoter selected from the group consisting of: a muscle creatine kinase promoter, a C5-12 muscle promoter, MHCK7, and Desmin. In some embodiments, the promoter is a neuronal-biased promoter. In some embodiments, a neuronal-biased promoter is a promoter selected from the group consisting of: synapsin and MECP2. In some embodiments, the promoter is an astrocyte-biased promoter. In some embodiments, an astrocyte-biased promoter is a GFAP promoter.

[0035] In some embodiments, the coding region of the transgene comprises at least one modification, relative to a coding region of a naturally occurring gene. In some embodiments, the modification is an addition, substitution or deletion of at least one nucleotide. In some embodiments, the coding region of the transgene comprises a deletion of a native start codon, or a portion thereof. In some embodiments, the coding region of the transgene comprises an addition of a non-native stop codon, or a portion thereof. In some embodiments, the transgene comprises one or more recombinant introns (e.g., a 3′ UTR intron). In some embodiments, the one or more recombinant introns (e.g., a 3′ UTR intron), when translated, elicits nonsense mediated decay (NMD).

[0036] In some embodiments, the naturally occurring gene is a gene selected from the group consisting of MBNL1, MBNL2, MBNL3, hnRNP A1, hnRNP A2B1, hnRNP C, hnRNP D, hnRNP DL, hnRNP F, hnRNP H, hnRNP K, hnRNP L, hnRNP M, hnRNP R, hnRNP U, FUS, TDP43, PABPN1, ATXN2, TAF15, EWSR1, MATR3, TIA1, FMRP, MTM1, MTMR2, LAMP2, KIF5A, a microdystrophin-encoding gene, C9ORF72, HTT, DNM2, BIN1, RYR1, NEB, ACTA, TPM3, TPM2, TNNT2, CFL2, KBTBD13, KLHL40, KLHL41, LMOD3, MYPN, SEPN1, TTN, SPEG, MYH7, TK2, POLG1, GAA, AGL, PYGM, SLC22A5, OCTN2, ETF, ETFH, PNPLA2, a cytochrome b oxidase-encoding gene, a cytochrome c oxidase-encoding gene, CLCN1, SCN4A, DMPK, CNBP, MYOT, LMNA, CAV3, DNAJB6, DES, TNPO3, HNRPDL, CAPN3, DYSF, an alpha-sarcoglycan-encoding gene, a beta-sarcoglycan-encoding gene, a gamma-sarcoglycan-encoding gene, a delta-sarcoglycan-encoding gene, TCAP, TRIM32, FKRP, FXN, POMT1, FKTN, POMT2, POMGnT1, DAG1, ANO5, PLEC1, TRAPPC11, GMPPB, ISPD, LIMS2, POPDC1, TOR1AIP1, POGLUT2, LAMA2, COL6A1, POMT1, POMT2, DUX4, EMD, PAX7, PMP22, MPZ, MFN2, SMCHD1, SMN, Lamin A/C (LAMN), and/or GJB1. In some embodiments, the naturally occurring gene is MTM1, CAPN3, or FXN. In some embodiments, the naturally occurring gene is MTM1. In some embodiments, the naturally occurring gene is CAPN3. In some embodiments, the naturally occurring gene is FXN.

[0037] In some embodiments, the coding region of the transgene comprises a polynucleotide having at least 70%, at least 75%, at least 80%, at least 90%, at least 92%, at least 95%, at least 98%, or at least 99% sequence identity, relative to a nucleic acid sequence as set forth in either SEQ ID NO: 1881 or SEQ ID NO: 1882. In some embodiments, the coding region of the transgene comprises a polynucleotide having a nucleic acid sequence as set forth in either SEQ ID NO: 1881 or SEQ ID NO: 1882.

[0038] In some embodiments, the recombinant viral genome is a recombinant genome from an adeno-associated virus (rAAV), lentivirus, retrovirus, or foamyvirus. In some embodiments, the recombinant viral genome is from an AAV. In some embodiments, the transgene is flanked by AAV inverted terminal repeat (ITR) sequences. In some embodiments, the ITR sequences comprise AAV1, AAV2, AAV5, AAV7, AAV8, or AAV9 ITR sequences. In some embodiments, the recombinant viral genome is from a lentivirus. In some embodiments, the alternatively-spliced exon cassette is located on the minus strand of the lentivirus genome.

[0039] In some embodiments, a recombinant viral genome of the present disclosure further comprises a 3′ untranslated region (UTR) that is endogenous or exogenous to the transgene. In some embodiments, the exogenous 3′ UTR is the 3′ UTR from bovine growth hormone, SV40, EBV, or Myc.

[0040] In some embodiments, the exogenous 3′ UTR is SV40. In some embodiments, the SV40 3′ UTR comprises a polynucleotide having at least 70%, at least 75%, at least 80%, at least 90%, at least 92%, at least 95%, at least 98%, or at least 99% sequence identity, relative to a nucleic acid sequence as set forth in SEQ ID NO: 1883. In some embodiments, the SV40 3′ UTR comprises a polynucleotide having a nucleic acid sequence as set forth in SEQ ID NO: 1883.

[0041] In some embodiments, the exogenous 3′ UTR comprises a polyadenylation (pA) signal. In some embodiments, the pA signal is an SV40 pA signal.

[0042] Aspects of the invention contemplate a viral particle comprising a viral genome according to any embodiment of the present disclosure. In some embodiments, the viral particle is an rAAV particle. In some embodiments, the rAAV particle comprises an AAV serotype selected from the group consisting of 1, 2, 3, 4, 5, 6, 7, 8, 9, or 10. In some embodiments, the rAAV particle comprises AAV serotype 9. In some embodiments, the rAAV particle comprises an AAV derivative or pseudotype selected from the group consisting of an AAV2-AAV3 hybrid, AAVrh.10, AAVhu.14, AAV3a/3b, AAVrh32.33, AAV-HSC15, AAV-HSC17, AAVhu.37, AAVrh.8, CHt-P6, AAV2.5, AAV6.2, AAV2i8, AAV-HSC15/17, AAVM41, AAV9.45, AAV6(Y445F/Y731F), AAV2.5T, AAV-HAE1/2, AAV clone 32/83, AAVShH10, AAV2 (Y→F), AAV8 (Y733F), AAV2.15, AAV2.4, AAVM41, and AAVr3.45.

[0043] In some embodiments, the viral particle further comprises at least one helper plasmid. In some embodiments, the helper plasmid comprises a rep gene and a cap gene. In some embodiments, the rep gene encodes Rep78, Rep68, Rep52, or Rep40. In some embodiments, the cap gene encodes a VP1, VP2, and/or VP3 region of the viral capsid protein. In some embodiments, the viral particle comprises two helper plasmids. In some embodiments, the first helper plasmid comprises a rep gene and a cap gene and the second helper plasmid comprises a E1a gene, a E1b gene, a E4 gene, a E2a gene, and a VA gene.

[0044] In some embodiments, the viral particle is a recombinant lentivirus particle. In some embodiments, the lentivirus is a human immunodeficiency virus (HIV1 or HIV2), a feline immunodeficiency virus (FIV), a bovine immunodeficiency virus (BIV), a caprine arthritis encephalitis virus, an equine infectious anemia virus, a jembrana disease virus, a puma lentivirus, aimian immunodeficiency virus, or a visna-maedi virus. In some embodiments, the viral particle further comprises a viral envelope.

[0045] Aspects of the invention relate to a method of treating a disease or condition in a subject comprising administering a recombinant viral genome or a viral particle according to any embodiment of the present disclosure to the subject. In some embodiments, the subject is a mammal. In some embodiments, the mammal is a human. In some embodiments, the recombinant viral genome or viral particle is administered to the subject at least one time. In some embodiments, the recombinant viral genome or viral particle is administered to the subject 2, 3, 4, 5, 6, 7, 8, 9, or 10 times. In some embodiments, the recombinant viral genome or viral particle is administered to the subject parenterally, subcutaneously, intraocularly, intravitreally, subretinally, intravenously (IV), intracerebro-ventricularly, intramuscularly, intrathecally (IT), intracisternally, intraperitoneally, enterally, via inhalation, topically, or by direct injection to one or more cells, tissues, or organs. In some embodiments, the recombinant viral genome or viral particle is administered to the subject by intravenous injection, intramuscular injection, intrathecal injection, or intravitreal injection.

[0046] In some embodiments, the disease or condition is a disease or condition selected from the group consisting of Dentatorubral-pallido-luysian atrophy (DRPLA), myotonic dystrophy type 1 (DM1), myotonic dystrophy type 2 (DM2), Fragile X syndrome of mental retardation (FMR1), Fragile X tremor ataxia syndrome (FXTAS), FRAXE mental retardation (FMR2), Friedreichs ataxia (FRDA), Huntington disease (HD), Huntington disease-like 2 (HDL2), Oculopharyngeal muscular dystrophy (OPMD), Myoclonic epilepsy type 1, Alzheimer's disease, ALS/FTD, spinocerebellar ataxia type 1 (SCA1), spinocerebellar ataxia type 2 (SCA2), spinocerebellar ataxia type 3 (SCA3), spinocerebellar ataxia type 6 (SCA6), spinocerebellar ataxia type 7 (SCAT), spinocerebellar ataxia type 8 (SCA8), spinocerebellar ataxia type 10 (SCA10), spinocerebellar ataxia type 12 (SCA12), spinocerebellar ataxia type 17 (SCA17), Syndromic/non-syndromic X-linked mental retardation, Emery-Dreifuss muscular dystrophy type 2, familial partial lipodystrophy, limb girdle muscular dystrophy type 1B, dilated cardiomyopathy, familial partial lipodystrophy, Charcot-Marie-Tooth disorder type 2B1, mandibuloacral dysplasia, childhood progeria syndrome (Hutchinson-Gilford syndrome), Werner syndrome, Dilated cardiomyopathy (DCM), Hypertrophic cardiomyopathy (HCM), Restrictive cardiomyopathy (RCM), Left Ventricular Non-compaction (LVNC), Arrhythmogenic Right Ventricular Dysplasia (ARVD), takotsubo cardiomyopathy, Duchenne muscular dystrophy, Becker muscular dystrophy, Limb-girdle muscular dystrophy, Facioscapulohumeral muscular dystrophy, Congenital muscular dystrophy, Oculopharyngeal muscular dystrophy, Distal muscular dystrophy, Emery-Dreifuss muscular dystrophy, dementia, Parkinson's disease (PD), a PD-related disorder, Prion disease, a motor neuron disease (MND), Progressive bulbar palsy (PBP), Progressive muscular atrophy (PMA), Primary lateral sclerosis (PLS), Spinal muscular atrophy (SMA), a bladder cancer, a breast cancer, a colorectal cancer, a kidney cancer, a lung cancer, a lymphoma, a melanoma, an oral cancer, an ovarian cancer, an oropharyngeal cancer, a pancreatic cancer, a prostate cancer, a thyroid cancer, a uterine cancer, Down syndrome, Prader-Willi Syndrome (PWS), Bloom Syndrome, Cockayne Syndrome Type I-216400, Cockayne Syndrome Type III, Cockayne Syndrome Type I, Hutchinson-Gilford Progeria Syndrome, Mandibuloacral Dysplasia with Type A Lipodystrophy, Progeria, Adult Onset Progeroid Syndrome, Neonatal Rothmund-Thomson Syndrome, Seip Syndrome, Werner Syndrome, Replication Focus-Forming Activity 1, myotubular myopathy, Danon Disease, and/or centronuclear myopathy.

[0047] Aspects of the invention relate to a method of regulating transgene expression (e.g., comprising a coding region of interest which encodes a protein of interest, such as a therapeutic protein) using a viral vector comprising a recombinant viral genome as described herein, wherein the transgene, or coding region of the transgene, are under the regulatory control of an alternatively-spliced exon. In some embodiments, the method comprises inserting into the recombinant viral genome at least one alternatively-spliced exon and at least one coding region of interest (e.g., which encodes a therapeutic protein), wherein the expression of the at least one coding region of interest is regulated by the alternative-spliced exon. In turn, how the regulation of the coding region of interest is imparted depends on (a) the presence or absence of positive or negative regulatory control sequences in the alternatively-spliced exon, and (b) whether the alternatively-splice exon is spliced-in (i.e., retained) or spliced-out (i.e., removed) from the final mRNA transcript isoform. The recombinant viral genome may be configured with one or more additional introns, exons, and/or regulatory sequences (e.g., promoters, enhancers, and the like that control transcription from the recombinant viral genome). In addition, the alternatively-splice exon may be comprised on a cassette (which may be referred to as an alternatively-spliced exon cassette), comprising the alternatively-spliced exon(s) and one or more introns, which may be inserted into the recombinant viral genome in a manner that couples it to the coding region of interest, such that the expression of the coding region of interest comes under regulatory control of the alternatively-spliced exon of the cassette.

[0048] In other embodiments, the transgene comprises an alternatively-spliced exon, optionally one or more introns (or portion(s) thereof), optionally one or more constitutive exons, and a coding region of interest.

[0049] Aspects of the invention relate to a method of regulating transgene (e.g., comprising a coding region of interest which encodes a protein of interest, such as a therapeutic protein) expression using a viral vector comprising a recombinant viral genome as described herein. In some embodiments, the method comprises: (a) inserting into the recombinant viral genome at least one transgene, wherein the transgene comprises a constitutive exon, at least one alternatively-spliced exon, at least one flanking intron (or portion thereof), and a coding region of a transgene; (b) introducing a heterologous start codon or part of a heterologous start codon at the 3′ end of the alternatively-spliced exon; (c) disrupting or deleting all native start codons located 5′ to the heterologous start codon; and (d) deleting or disrupting one or more native start codons, or a portion(s) thereof, from the coding region of the transgene. In some embodiments, the method comprises: (a) inserting into the recombinant viral genome at least one transgene, wherein the transgene comprises a constitutive exon, at least one alternatively-spliced exon, at least one flanking intron (or portion thereof), and a coding region of a transgene; (b) introducing a heterologous start codon or part of a heterologous start codon at the 3′ end of the alternatively-spliced exon; (c) disrupting or deleting all native start codons located 5′ to the heterologous start codon; and (d) adding a heterologous 3′ UTR, or a portion thereof, to the coding region of the transgene. In some embodiments, translation of the heterologous 3′ UTR elicits nonsense mediated decay. In some embodiments, (a) inserting into the recombinant viral genome at least one alternatively-spliced exon cassette, wherein the alternatively-spliced exon cassette comprises a constitutive exon, at least one alternatively-spliced exon, at least one flanking intron (or portion thereof), and a coding region of a transgene; (b) introducing a heterologous start codon or part of a heterologous start codon at the 3′ end of the alternatively-spliced exon; (c) disrupting or deleting all native start codons located 5′ to the heterologous start codon; (d) deleting or disrupting one or more native start codons, or a portion(s) thereof, from the coding region of the transgene; and (e) adding a heterologous 3′ UTR, or a portion thereof, to the coding region of the transgene. In some embodiments, translation of the heterologous 3′ UTR elicits nonsense mediated decay. In some embodiments, the constitutive exon, alternatively-spliced exon, and flanking intron (or portion thereof) are each located 5′ to the coding region of the transgene.

[0050] Aspects of the invention relate to a method of regulating transgene (e.g., comprising a coding region of interest which encodes a protein of interest, such as a therapeutic protein) expression using a viral vector comprising a recombinant viral genome as described herein. In some embodiments, the method comprises: (a) inserting into the recombinant viral genome at least one transgene, wherein the transgene comprises an alternatively-spliced exon and at least one flanking intron (or portion thereof) within the coding region of the transgene; and (b) introducing into the alternatively-spliced exon a heterologous, in-frame stop codon upstream of the next 5′ splice junction. In some embodiments, the heterologous, in-frame stop codon elicits nonsense-mediated decay. In certain embodiments, the in-frame stop codon is inserted at least 100 nucleotides, at least 95 nucleotides, at least 90 nucleotides, at least 85 nucleotides, at least 80 nucleotides, at least 75 nucleotides, at least 70 nucleotides, at least 65 nucleotides, at least 60 nucleotides, at least 55 nucleotides, at least 50 nucleotides, at least 45 nucleotides, at least 40 nucleotides, at least 35 nucleotides, at least 30 nucleotides, at least 25 nucleotides, at least 20 nucleotides, at least 15 nucleotides, at least 10 nucleotides, or at least 5 nucleotides, or between 1 to 5 nucleotides upstream of the next 5′ splice junction.

[0051] Aspects of the invention relate to a transgene comprising, in the 5′ to 3′ direction: (i) a nucleotide sequence comprising a first exonic sequence having a 5′ to 3′ orientation, wherein the first exonic sequence comprises a constitutive exon; (ii) a nucleotide sequence comprising a first intronic sequence having a 5′ to 3′ orientation, wherein the first intronic sequence comprises at its 5′ end a 5′ splice donor site and at its 3′ end a 3′ splice acceptor site; (iii) a nucleotide sequence comprising a second exonic sequence having a 5′ to 3′ orientation, wherein the second exonic sequence comprises an alternatively-spliced exon comprising at its 3′ end a heterologous ATG start codon; (iv) a nucleotide sequence comprising a second intronic sequence having a 5′ to 3′ orientation, wherein the second intronic sequence comprises at its 5′ end a 5′ splice donor site and at its 3′ end a 3′ splice acceptor site; and (v) a nucleotide sequence comprising a coding region of the transgene having a 5′ to 3′ orientation, wherein the coding region of the transgene comprises at its 5′ end a modification comprising the removal of a native ATG start codon. In some embodiments, all native ATG start codons located upstream of the heterologous ATG start codon are mutated or deleted.

[0052] Other aspects of the invention relate to a transgene comprising, in the 5′ to 3′ direction: (i) a nucleotide sequence comprising a first portion of a coding region of the transgene having a 5′ to 3′ orientation; (ii) a nucleotide sequence comprising a first intronic sequence having a 5′ to 3′ orientation, wherein the first intronic sequence comprises at its 5′ end a 5′ splice donor site and at its 3′ end a 3′ splice acceptor site; (iii) a nucleotide sequence comprising an exonic sequence having a 5′ to 3′ orientation, wherein the exonic sequence comprises an alternatively-spliced exon comprising at its 3′ end a heterologous stop codon; (iv) a nucleotide sequence comprising a second intronic sequence having a 5′ to 3′ orientation, wherein the second intronic sequence comprises at its 5′ end a 5′ splice donor site and at its 3′ end a 3′ splice acceptor site; and (v) a nucleotide sequence comprising a second portion of a coding region of the transgene having a 5′ to 3′ orientation.

[0053] Aspects of the invention relate to a transgene comprising, in the 5′ to 3′ direction: (i) a nucleotide sequence comprising a coding region of the transgene having a 5′ to 3′ orientation; (ii) a nucleotide sequence comprising a first intronic sequence having a 5′ to 3′ orientation, wherein the first intronic sequence comprises at its 5′ end a 5′ splice donor site and at its 3′ end a 3′ splice acceptor site; (iii) a nucleotide sequence comprising a first exonic sequence having a 5′ to 3′ orientation, wherein the first exonic sequence comprises an alternatively-spliced exon comprising a positive or negative cis-acting element; (iv) a nucleotide sequence comprising a second intronic sequence having a 5′ to 3′ orientation, wherein the second intronic sequence comprises at its 5′ end a 5′ splice donor site and at its 3′ end a 3′ splice acceptor site; and (v) a nucleotide sequence comprising a second exonic sequence having a 5′ to 3′ orientation, wherein the exonic sequence comprises a constitutive exon.

[0054] Aspects of the invention relate to a transgene comprising, in the 5′ to 3′ direction: (i) a nucleotide sequence comprising a first exonic sequence having a 5′ to 3′ orientation, wherein the first exonic sequence comprises a constitutive exon; (ii) a nucleotide sequence comprising a second exonic sequence having a 5′ to 3′ orientation, wherein the second exonic sequence comprises an alternatively-spliced exon comprising at its 3′ end a heterologous ATG start codon; and (iii) a nucleotide sequence comprising a coding region of the transgene having a 5′ to 3′ orientation, wherein the coding region of the transgene comprises at its 5′ end a modification comprising the removal of a native ATG start codon. In some embodiments, all native ATG start codons located upstream of the heterologous ATG start codon are mutated or deleted.

[0055] Aspects of the invention relate to a transgene comprising, in the 5′ to 3′ direction: (i) a nucleotide sequence comprising a first portion of a coding region of the transgene having a 5′ to 3′ orientation; (ii) a nucleotide sequence comprising a first exonic sequence having a 5′ to 3′ orientation, wherein the first exonic sequence comprises an alternatively-spliced exon comprising at its 3′ end a heterologous stop codon; (iii) a nucleotide sequence comprising a second portion of a coding region of the transgene having a 5′ to 3′ orientation; (iv) a nucleotide sequence comprising an intronic sequence having a 5′ to 3′ orientation, wherein the intronic sequence comprises at its 5′ end a 5′ splice donor site and at its 3′ end a 3′ splice acceptor site; and (v) a nucleotide sequence comprising a second exonic sequence having a 5′ to 3′ orientation, wherein the second exonic sequence comprises a constitutive exon.

[0056] Aspects of the invention relate to a transgene comprising, in the 5′ to 3′ direction: (i) a nucleotide sequence comprising a coding region of the transgene having a 5′ to 3′ orientation; (ii) a nucleotide sequence comprising a first exonic sequence having a 5′ to 3′ orientation, wherein the first exonic sequence comprises an alternatively-spliced exon comprising a positive or negative cis-acting element; and (iii) a nucleotide sequence comprising a second exonic sequence having a 5′ to 3′ orientation, wherein the second exonic sequence comprises a constitutive exon.

[0057] Aspects of the invention relate to a transgene comprising, in the 5′ to 3′ direction: (i) a nucleotide sequence comprising a first exonic sequence having a 5′ to 3′ orientation, wherein the first exonic sequence comprises a constitutive exon; (ii) a nucleotide sequence comprising a second exonic sequence having a 5′ to 3′ orientation, wherein the second exonic sequence comprises an alternatively-spliced exon comprising at its 3′ end a heterologous ATG start codon; (iii) a nucleotide sequence comprising an intronic sequence having a 5′ to 3′ orientation, wherein the intronic sequence comprises at its 5′ end a 5′ splice donor site and at its 3′ end a 3′ splice acceptor site; and (iv) a nucleotide sequence comprising a coding region of the transgene having a 5′ to 3′ orientation, wherein the coding region of the transgene comprises at its 5′ end a modification comprising the removal of a native ATG start codon. In some embodiments, all native ATG start codons located upstream of the heterologous ATG start codon are mutated or deleted.

[0058] Aspects of the invention relate to a transgene comprising, in the 5′ to 3′ direction: (i) a nucleotide sequence comprising a first portion of a coding region of the transgene having a 5′ to 3′ orientation; (ii) a nucleotide sequence comprising an exonic sequence having a 5′ to 3′ orientation, wherein the exonic sequence comprises an alternatively-spliced exon comprising at its 3′ end a heterologous stop codon; (iii) a nucleotide sequence comprising an intronic sequence having a 5′ to 3′ orientation, wherein the intronic sequence comprises at its 5′ end a 5′ splice donor site and at its 3′ end a 3′ splice acceptor site; and (iv) a nucleotide sequence comprising a second portion of a coding region of the transgene having a 5′ to 3′ orientation.

[0059] Aspects of the invention relate to a transgene comprising, in the 5′ to 3′ direction: (i) a nucleotide sequence comprising a coding region of the transgene having a 5′ to 3′ orientation; (ii) a nucleotide sequence comprising a first exonic sequence having a 5′ to 3′ orientation, wherein the exonic sequence comprises an alternatively-spliced exon comprising a positive or negative cis-acting element; (iii) a nucleotide sequence comprising an intronic sequence having a 5′ to 3′ orientation, wherein the intronic sequence comprises at its 5′ end a 5′ splice donor site and at its 3′ end a 3′ splice acceptor site; and (iv) a nucleotide sequence comprising a second exonic sequence having a 5′ to 3′ orientation, wherein the exonic sequence comprises a constitutive exon.

[0060] Aspects of the invention relate to a transgene comprising, in the 5′ to 3′ direction: (i) a nucleotide sequence comprising a first exonic sequence having a 5′ to 3′ orientation, wherein the first exonic sequence comprises a constitutive exon; (ii) a nucleotide sequence comprising an intronic sequence having a 5′ to 3′ orientation, wherein the intronic sequence comprises at its 5′ end a 5′ splice donor site and at its 3′ end a 3′ splice acceptor site; (iii) a nucleotide sequence comprising a second exonic sequence having a 5′ to 3′ orientation, wherein the second exonic sequence comprises an alternatively-spliced exon comprising at its 3′ end a heterologous ATG start codon; and (iv) a nucleotide sequence comprising a coding region of the transgene having a 5′ to 3′ orientation, wherein the coding region of the transgene comprises at its 5′ end a modification comprising the removal of a native ATG start codon. In some embodiments, all native ATG start codons located upstream of the heterologous ATG start codon are mutated or deleted.

[0061] Aspects of the invention relate to a transgene comprising, in the 5′ to 3′ direction: (i) a nucleotide sequence comprising a first portion of a coding region of the transgene having a 5′ to 3′ orientation; (ii) a nucleotide sequence comprising a first intronic sequence having a 5′ to 3′ orientation, wherein the first intronic sequence comprises at its 5′ end a 5′ splice donor site and at its 3′ end a 3′ splice acceptor site; (iii) a nucleotide sequence comprising a first exonic sequence having a 5′ to 3′ orientation, wherein the first exonic sequence comprises an alternatively-spliced exon comprising at its 3′ end a heterologous stop codon; (iv) a nucleotide sequence comprising a second portion of a coding region of the transgene having a 5′ to 3′ orientation; (v) a nucleotide sequence comprising a second intronic sequence having a 5′ to 3′ orientation, wherein the second intronic sequence comprises at its 5′ end a 5′ splice donor site and at its 3′ end a 3′ splice acceptor site; and (vi) a nucleotide sequence comprising a second exonic sequence having a 5′ to 3′ orientation, wherein the second exonic sequence comprises a constitutive exon.

[0062] Aspects of the invention relate to a transgene comprising, in the 5′ to 3′ direction: (i) a nucleotide sequence comprising a coding region of the transgene having a 5′ to 3′ orientation; (ii) a nucleotide sequence comprising an intronic sequence having a 5′ to 3′ orientation, wherein the intronic sequence comprises at its 5′ end a 5′ splice donor site and at its 3′ end a 3′ splice acceptor site; (iii) a nucleotide sequence comprising an exonic sequence having a 5′ to 3′ orientation, wherein the exonic sequence comprises an alternatively-spliced exon comprising a positive or negative cis-acting element; and (iv) a nucleotide sequence comprising a second exonic sequence having a 5′ to 3′ orientation, wherein the exonic sequence comprises a constitutive exon.

[0063] Aspects of the invention relate to a transgene comprising, in the 5′ to 3′ direction: (i) a nucleotide sequence comprising a first exonic sequence having a 5′ to 3′ orientation, wherein the first exonic sequence comprises a constitutive exon; (ii) a nucleotide sequence comprising a first intronic sequence having a 5′ to 3′ orientation, wherein the first intronic sequence comprises at its 5′ end a 5′ splice donor site and at its 3′ end a 3′ splice acceptor site; (iii) a nucleotide sequence comprising a second exonic sequence having a 5′ to 3′ orientation, wherein the second exonic sequence comprises an alternatively-spliced exon comprising at its 3′ end a heterologous ATG start codon; (iv) a nucleotide sequence comprising a second intronic sequence having a 5′ to 3′ orientation, wherein the second intronic sequence comprises at its 5′ end a 5′ splice donor site and at its 3′ end a 3′ splice acceptor site; (v) a nucleotide sequence comprising a third exonic sequence having a 5′ to 3′ orientation, wherein the third exonic sequence comprises an alternatively-spliced exon; (vi) a nucleotide sequence comprising a third intronic sequence having a 5′ to 3′ orientation, wherein the third intronic sequence comprises at its 5′ end a 5′ splice donor site and at its 3′ end a 3′ splice acceptor site; and (vii) a nucleotide sequence comprising a coding region of the transgene having a 5′ to 3′ orientation, wherein the coding region of the transgene comprises at its 5′ end a modification comprising the removal of a native ATG start codon. In some embodiments, all native ATG start codons located upstream of the heterologous ATG start codon are mutated or deleted.

[0064] Aspects of the invention relate to a transgene comprising, in the 5′ to 3′ direction: (i) a nucleotide sequence comprising a first portion of a coding region of the transgene having a 5′ to 3′ orientation; (ii) a nucleotide sequence comprising a first intronic sequence having a 5′ to 3′ orientation, wherein the first intronic sequence comprises at its 5′ end a 5′ splice donor site and at its 3′ end a 3′ splice acceptor site; (iii) a nucleotide sequence comprising a first exonic sequence having a 5′ to 3′ orientation, wherein the first exonic sequence comprises an alternatively-spliced exon comprising at its 3′ end a heterologous stop codon; (iv) a nucleotide sequence comprising a second intronic sequence having a 5′ to 3′ orientation, wherein the second intronic sequence comprises at its 5′ end a 5′ splice donor site and at its 3′ end a 3′ splice acceptor site; (v) a nucleotide sequence comprising a second exonic sequence having a 5′ to 3′ orientation, wherein the second exonic sequence comprises an alternatively-spliced exon; (vi) a nucleotide sequence comprising a third intronic sequence having a 5′ to 3′ orientation, wherein the third intronic sequence comprises at its 5′ end a 5′ splice donor site and at its 3′ end a 3′ splice acceptor site (m); and (vii) a nucleotide sequence comprising a second portion of a coding region of the transgene having a 5′ to 3′ orientation.

[0065] Aspects of the invention relate to a transgene comprising, in the 5′ to 3′ direction: (i) a nucleotide sequence comprising a coding region of the transgene having a 5′ to 3′ orientation; (ii) a nucleotide sequence comprising a first intronic sequence having a 5′ to 3′ orientation, wherein the first intronic sequence comprises at its 5′ end a 5′ splice donor site and at its 3′ end a 3′ splice acceptor site; (iii) a nucleotide sequence comprising a first exonic sequence having a 5′ to 3′ orientation (e), wherein the first exonic sequence comprises a first alternatively-spliced exon comprising a positive or negative cis-acting element; (iv) a nucleotide sequence comprising a second intronic sequence having a 5′ to 3′ orientation, wherein the second intronic sequence comprises at its 5′ end a 5′ splice donor site and at its 3′ end a 3′ splice acceptor site; (v) a nucleotide sequence comprising a second exonic sequence having a 5′ to 3′ orientation, wherein the second exonic sequence comprises a second alternatively-spliced exon; (vi) a nucleotide sequence comprising a third intronic sequence having a 5′ to 3′ orientation, wherein the third intronic sequence comprises at its 5′ end a 5′ splice donor site and at its 3′ end a 3′ splice acceptor site; and (vii) a nucleotide sequence comprising a third exonic sequence having a 5′ to 3′ orientation, wherein the third exonic sequence comprises a constitutive exon.

[0066] Aspects of the invention relate to a transgene comprising, in the 5′ to 3′ direction: (i) a nucleotide sequence comprising a first exonic sequence having a 5′ to 3′ orientation, wherein the first exonic sequence comprises a constitutive exon; (ii) a nucleotide sequence comprising a first intronic sequence having a 5′ to 3′ orientation, wherein the first intronic sequence comprises at its 5′ end a 5′ splice donor site and at its 3′ end a 3′ splice acceptor site; (iii) a nucleotide sequence comprising a coding region of the transgene having a 5′ to 3′ orientation; (iv) a nucleotide sequence comprising a second intronic sequence having a 5′ to 3′ orientation, wherein the second intronic sequence comprises at its 5′ end a 5′ splice donor site and at its 3′ end a 3′ splice acceptor site; and (v) a nucleotide sequence comprising a second exonic sequence having a 5′ to 3′ orientation, wherein the second exonic sequence comprises an alternatively-spliced exon.

[0067] Aspects of the invention relate to a transgene comprising, in the 5′ to 3′ direction: (i) a nucleotide sequence comprising a first portion of a coding region of the transgene having a 5′ to 3′ orientation; (ii) a nucleotide sequence comprising a first intronic sequence having a 5′ to 3′ orientation, wherein the first intronic sequence comprises at its 5′ end a 5′ splice donor site and at its 3′ end a 3′ splice acceptor site; (iii) a nucleotide sequence comprising a first exonic sequence having a 5′ to 3′ orientation, wherein the first exonic sequence comprises an alternatively-spliced exon comprising at its 3′ end a heterologous stop codon; (iv) a nucleotide sequence comprising a second intronic sequence having a 5′ to 3′ orientation, wherein the second intronic sequence comprises at its 5′ end a 5′ splice donor site and at its 3′ end a 3′ splice acceptor site; (v) a nucleotide sequence comprising a second exonic sequence having a 5′ to 3′ orientation, wherein the second exonic sequence comprises a constitutive exon; (vi) a nucleotide sequence comprising a third intronic sequence having a 5′ to 3′ orientation, wherein the third intronic sequence comprises at its 5′ end a 5′ splice donor site and at its 3′ end a 3′ splice acceptor site; and (vii) a nucleotide sequence comprising a second portion of a coding region of the transgene having a 5′ to 3′ orientation.

[0068] Aspects of the invention relate to a transgene comprising, in the 5′ to 3′ direction: (i) a nucleotide sequence comprising a coding region of the transgene having a 5′ to 3′ orientation; (ii) a nucleotide sequence comprising a first intronic sequence having a 5′ to 3′ orientation, wherein the first intronic sequence comprises at its 5′ end a 5′ splice donor site and at its 3′ end a 3′ splice acceptor site; (iii) a nucleotide sequence comprising a first exonic sequence having a 5′ to 3′ orientation, wherein the first exonic sequence comprises an alternatively-spliced exon comprising a positive or negative cis-acting element; (iv) a nucleotide sequence comprising a second intronic sequence having a 5′ to 3′ orientation, wherein the second intronic sequence comprises at its 5′ end a 5′ splice donor site and at its 3′ end a 3′ splice acceptor site; and (v) a nucleotide sequence comprising a second exonic sequence having a 5′ to 3′ orientation, wherein the second exonic sequence comprises a constitutive exon.

[0069] Aspects of the disclosure relate to a transgene comprising: (i) a constitutive exon and one or more intronic sequences, each from a first gene; (ii) an alternatively-spliced exon cassette, and (iii) a coding region of interest from a third gene. In some embodiments, the alternatively-spliced exon cassette comprises: (a) an alternatively-spliced exon, and (b) flanking intronic sequences. In some embodiments, each of (a) and (b) are from a second gene. In some embodiments, the alternatively-spliced exon comprises an ATG start codon at its 3′ end.

[0070] In some embodiments, the first and second gene are the same gene; the first and third gene are the same gene; or all of the first, second, and third genes are the same gene.

[0071] In some embodiments, the first gene is survival motor neuron 1 (SMN1).

[0072] In some embodiments, the constitutive exon comprises exon 6 of SMN1, or a portion thereof. In some embodiments, the constitutive exon comprises a polynucleotide having at least 70%, at least 75%, at least 80%, at least 90%, at least 92%, at least 95%, at least 98%, or at least 99% sequence identity, relative to a nucleic acid sequence as set forth in SEQ ID NO: 102. In some embodiments, the constitutive exon comprises a polynucleotide having a nucleic acid sequence as set forth in SEQ ID NO: 102.

[0073] In some embodiments, the one or more intronic sequences of (i) are or are derived from intron 6 and/or intron 7 of SMN1. In some embodiments, the one or more intronic sequences of (i) comprise(s) a polynucleotide having at least 70%, at least 75%, at least 80%, at least 90%, at least 92%, at least 95%, at least 98%, or at least 99% sequence identity, relative to a nucleic acid sequence as set forth in SEQ ID NO: 103 and/or SEQ ID NO: 104. In some embodiments, the one or more intronic sequences of (i) comprise(s) a polynucleotide having a nucleic acid sequence as set forth in SEQ ID NO: 103 and/or SEQ ID NO: 104.

[0074] In some embodiments, the second gene is a gene selected from the group consisting of: CAMK2B, PKP2, LGMN, NRAP, VPS39, KSR1, PDLIM3, BIN1, ARFGAP2, KIF13A, and/or PICALM. In some embodiments, the second gene is bridging integrator 1 (BIN1).

[0075] In some embodiments, the alternatively-spliced exon comprises exon 11 of BIN1. In some embodiments, the alternatively-spliced exon comprises a polynucleotide having at least 70%, at least 75%, at least 80%, at least 90%, at least 92%, at least 95%, at least 98%, or at least 99% sequence identity, relative to a nucleic acid sequence as set forth in either SEQ ID NO: 37 or SEQ ID NO: 38. In some embodiments, the alternatively-spliced exon comprises a polynucleotide having a nucleic acid sequence as set forth in either SEQ ID NO: 37 or SEQ ID NO: 38.

[0076] In some embodiments, the flanking intronic sequences of (ii) are or are derived from intron 10 and/or intron 11 of BIN1. In some embodiments, the flanking intronic sequences of (ii) each comprise a polynucleotide having at least 70%, at least 75%, at least 80%, at least 90%, at least 92%, at least 95%, at least 98%, or at least 99% sequence identity, relative to a nucleic acid sequence as set forth in either SEQ ID NO: 15 or SEQ ID NO: 16. In some embodiments, the flanking intronic sequences of (ii) each comprise a polynucleotide having a nucleic acid sequence as set forth in either SEQ ID NO: 15 or SEQ ID NO: 16.

[0077] In some embodiments, the alternatively-spliced exon cassette comprises a polynucleotide having at least 70%, at least 75%, at least 80%, at least 90%, at least 92%, at least 95%, at least 98%, or at least 99% sequence identity, relative to a nucleic acid sequence as set forth in any one of SEQ ID NOs: 107-778. In some embodiments, the alternatively-spliced exon cassette comprises a polynucleotide having a nucleic acid sequence as set forth in any one of SEQ ID NOs: 107-778.

[0078] In some embodiments, the third gene is myotubularin 1 (MTM1) or calpain 3 (CAPN3). In some embodiments, the coding region of interest comprises a polynucleotide having at least 70%, at least 75%, at least 80%, at least 90%, at least 92%, at least 95%, at least 98%, or at least 99% sequence identity, relative to a nucleic acid sequence as set forth in either SEQ ID NO: 1881 or SEQ ID NO: 1882. In some embodiments, the coding region of interest comprises a polynucleotide having a nucleic acid sequence as set forth in either SEQ ID NO: 1881 or SEQ ID NO: 1882.

[0079] In some embodiments, if the wild-type alternatively-spliced exon does not comprise an ATG start codon, the alternatively-spliced exon comprises 1-3 nucleic acid substitutions, relative to the wild-type alternatively-spliced exon, to form the ATG start codon within the alternatively-spliced exon. In some embodiments, the ATG start codon is formed in the alternatively-spliced exon by 1 nucleic acid substitution. In some embodiments, the ATG start codon is formed in the alternatively-spliced exon by 2 nucleic acid substitutions. In some embodiments, the ATG start codon is formed in the alternatively-spliced exon by 3 nucleic acid substitutions.

[0080] In some embodiments, the alternatively-spliced exon is retained in the spliced transcript. In some embodiments, all native start codons located 5′ to the ATG start codon located within the alternatively-spliced exon are disrupted or deleted.

[0081] In some embodiments, the alternatively-spliced exon cassette is located 5′, relative to the coding region of interest. In some embodiments, the constitutive exon is located 5′, relative to the alternatively-spliced exon cassette. In some embodiments, the one or more intronic sequences of (i) flank the alternatively-spliced exon cassette.

[0082] In some embodiments, the alternatively-spliced exon comprises a heterologous, in-frame stop codon. In some embodiments, the heterologous, in-frame stop codon is at least 50 nucleotides upstream of the next 5′ splice junction. In some embodiments, the heterologous, in-frame stop codon elicits nonsense-mediated decay.

[0083] In some embodiments, the alternatively-spliced exon is retained in the spliced transcript in distinct tissues. In some embodiments, the alternatively-spliced exon is retained in the spliced transcript in skeletal muscle. In some embodiments, the alternatively-spliced exon is not retained in the spliced transcript in heart and/or liver tissue.

[0084] In some embodiments, the flanking intronic sequences of (ii)(b) are or are derived from native flanking introns of the alternatively-spliced exon. In some embodiments, the flanking intronic sequences of (ii)(b) each comprise at least one modification, relative to a naturally occurring intronic sequence. In some embodiments, the modification is a substitution or deletion of one or more nucleic acids.

[0085] In some embodiments, the ATG start codon is located at the 3′ end of the alternatively-spliced exon. In some embodiments, the ATG start codon is in the same reading frame as the coding region of interest. In some embodiments, the ATG start codon is within up to 5, 10, 20, or 30 nucleotides upstream of the 3′ end of the alternative-spliced exon. In some embodiments, the ATG start codon is within up to 5, 10, 20, or 30 nucleotides upstream of the 3′ end of the alternative-spliced exon and is in the same reading frame as the coding region of interest.

[0086] In some embodiments, if the wild-type alternatively-spliced exon does not comprise an ATG start codon at its 3′ end, the first 10 nucleotides of the flanking intronic sequence which is immediately 3′ to the alternatively-spliced exon comprise 1-5 nucleotide substitutions, relative to the wild-type flanking intronic sequence which is immediately 3′ to the wild-type alternatively-spliced exon.

[0087] In some embodiments, the one or more intronic sequences of (i) each comprise at least one modification, relative to a naturally occurring intronic sequence. In some embodiments, the modification is a substitution or deletion of one or more nucleic acids.

[0088] In some embodiments, the coding region of interest comprises at least one modification, relative to a naturally occurring coding region of the third gene. In some embodiments, the modification is a substitution or deletion of one or more nucleic acids. In some embodiments, the coding region of interest comprises a deletion or disruption of a native start codon. In some embodiments, the coding region of interest comprises at least one heterologous stop codon. In some embodiments, the at least one heterologous stop codon is at least 50 nucleotides upstream of the next 5′ splice junction. In some embodiments, the at least one heterologous stop codon elicits nonsense-mediated decay.

[0089] In some embodiments, a transgene as described in any embodiment of the disclosure further comprises a 3′ untranslated region (UTR). In some embodiments, the 3′ UTR is SV40. In some embodiments, the SV40 3′ UTR comprises a polynucleotide having at least 70%, at least 75%, at least 80%, at least 90%, at least 92%, at least 95%, at least 98%, or at least 99% sequence identity, relative to a nucleic acid sequence as set forth in SEQ ID NO: 1883. In some embodiments, the SV40 3′ UTR comprises a polynucleotide having a nucleic acid sequence as set forth in SEQ ID NO: 1883. In some embodiments, the 3′ UTR comprises a polyadenylation (pA) site and a cleavage site. In some embodiments, the polyadenylation site is an SV40 pA site.

[0090] In some embodiments, a transgene as described in any embodiment of the disclosure further comprises a promoter, wherein the promoter is located 5′, relative to all of (i), (ii), and (iii). In some embodiments, the promoter is a tissue-specific promoter. In some embodiments, the tissue-specific promoter is an MHCK7 promoter. In some embodiments, an MHCK7 promoter comprises a polynucleotide having at least 70%, at least 75%, at least 80%, at least 90%, at least 92%, at least 95%, at least 98%, or at least 99% sequence identity, relative to a nucleic acid sequence as set forth in SEQ ID NO: 1880. In some embodiments, an MHCK7 promoter comprises a polynucleotide having a nucleic acid sequence as set forth in SEQ ID NO: 1880.

[0091] In some embodiments, the alternatively-spliced exon cassette comprises a nucleic acid sequence which is 450 to 650 nucleotides in length.

[0092] Aspects of the disclosure relate to a recombinant viral genome comprising a transgene as described in any embodiment of the disclosure. In some embodiments, the recombinant viral genome is a genome from a recombinant adeno-associated virus (rAAV). In some embodiments, the transgene is flanked by AAV inverted terminal repeat (ITR) sequences. In some embodiments, the AAV ITR sequences are AAV2 ITR sequences. In some embodiments, an AAV2 ITR comprises a polynucleotide having at least 70%, at least 75%, at least 80%, at least 90%, at least 92%, at least 95%, at least 98%, or at least 99% sequence identity, relative to a nucleic acid sequence as set forth in SEQ ID NO: 1879. In some embodiments, an AAV2 ITR comprises a polynucleotide having a nucleic acid sequence as set forth in SEQ ID NO: 1879.

[0093] In some embodiments, the recombinant viral genome comprises a polynucleotide having at least 70%, at least 75%, at least 80%, at least 90%, at least 92%, at least 95%, at least 98%, or at least 99% sequence identity, relative to a nucleic acid sequence as set forth in either SEQ ID NO: 105 or SEQ ID NO: 106. In some embodiments, the recombinant viral genome comprises a polynucleotide having a nucleic acid sequence as set forth in either SEQ ID NO: 105 or SEQ ID NO: 106.

[0094] Aspects of the disclosure relate to an rAAV particle comprising a recombinant viral genome as described in any embodiment of the disclosure. In some embodiments, the rAAV particle comprises AAV serotype 1, 2, 3, 4, 5, 6, 7, 8, 9, or 10, or AAV derivative or pseudotype AAV2-AAV3 hybrid, AAVrh.10, AAVhu.14, AAV3a/3b, AAVrh32.33, AAV-HSC15, AAV-HSC17, AAVhu.37, AAVrh.8, CHt-P6, AAV2.5, AAV6.2, AAV2i8, AAV-HSC15/17, AAVM41, AAV9.45, AAV6(Y445F/Y731F), AAV2.5T, AAV-HAE1/2, AAV clone 32/83, AAVShH10, AAV2 (Y→F), AAV8 (Y733F), AAV2.15, AAV2.4, AAVM41, and AAVr3.45. In some embodiments, the rAAV particle further comprises at least one helper plasmid. In some embodiments, the helper plasmid comprises a rep gene and a cap gene. In some embodiments, the rep gene encodes Rep78, Rep68, Rep52, or Rep40, and/or wherein the cap gene encodes a VP1, VP2, and/or VP3 region of the viral capsid protein. In some embodiments, the rAAV particle comprises two helper plasmids. In some embodiments, the first helper plasmid comprises a rep gene and a cap gene and the second helper plasmid comprises a E1a gene, a E1b gene, a E4 gene, a E2a gene, and a VA gene.

[0095] Aspects of the disclosure relate to a recombinant viral genome comprising a transgene. In some embodiments, the transgene comprises: (i) a constitutive exon and one or more intronic sequences; (ii) an alternative exon cassette; and (iii) a coding region of interest. In some embodiments, the alternative exon cassette comprises: (a) an alternatively-spliced exon; (b) at least a portion of the intron immediately upstream of the alternatively-spliced exon; and (c) at least a portion of the intron immediately downstream of the alternatively-spliced exon. In some embodiments, if the wild-type alternatively-spliced exon does not comprise an ATG start codon at its 3′ end: (1) the 3′ end of the alternatively-spliced exon comprises 1-3 nucleic acid substitutions relative to the wild-type alternatively-spliced exon to form an ATG start codon, and (2) the first 10 nucleotides of the intron immediately downstream of the alternatively-spliced exon comprise 1-5 nucleic acid substitutions relative to the wild-type intron immediately downstream of the wild-type alternatively-spliced exon.

[0096] In some embodiments, the 1-5 nucleic acid substitutions of (2) increase splice site strength. In some embodiments, any wild-type start codons within the alternatively-spliced exon located upstream of the ATG start codon at the 3′ end of the alternatively-spliced exon are disrupted or deleted. In some embodiments, the recombinant viral genome further comprises a tissue-specific promoter upstream of the alternative exon cassette. In some embodiments, the coding region of interest is or is derived from a naturally occurring coding region of MTM1 or CAPN3. In some embodiments, the tissue-specific promoter is an MHCK7 promoter. In some embodiments, the alternative exon is exon 11 of the BIN1 gene. In some embodiments, the constitutive exon is exon 6 of the SMN1 gene. In some embodiments, the alternative exon cassette promotes skeletal muscle expression of the coding region of interest and reduces cardiac muscle expression of the coding region of interest. In some embodiments, the alternative exon cassette is approximately 600 nucleotides in length.

[0097] Aspects of the disclosure relate to a method of treating a disease or condition in a subject comprising administering a recombinant viral genome or an rAAV particle according to any embodiment of the present disclosure to the subject. In some embodiments, the subject is a mammal. In some embodiments, the mammal is a human. In some embodiments, the recombinant viral genome or rAAV particle is administered to the subject at least one time. In some embodiments, the viral genome or rAAV particle is administered to the subject 2, 3, 4, 5, 6, 7, 8, 9, or 10 times. In some embodiments, the viral genome or rAAV particle is administered to the subject parenterally, subcutaneously, intraocularly, intravitreally, subretinally, intravenously (IV), intracerebro-ventricularly, intramuscularly, intrathecally (IT), intracisternally, intraperitoneally, enterally, via inhalation, topically, or by direct injection to one or more cells, tissues, or organs. In some embodiments, the viral genome or viral particle is administered to the subject by intravenous injection, intramuscular injection, intrathecal injection, or intravitreal injection. In some embodiments, the disease or condition is a disease or condition selected from the group consisting of Dentatorubral-pallido-luysian atrophy (DRPLA), myotonic dystrophy type 1 (DM1), myotonic dystrophy type 2 (DM2), Fragile X syndrome of mental retardation (FMR1), Fragile X tremor ataxia syndrome (FXTAS), FRAXE mental retardation (FMR2), Friedreichs ataxia (FRDA), Huntington disease (HD), Huntington disease-like 2 (HDL2), Oculopharyngeal muscular dystrophy (OPMD), Myoclonic epilepsy type 1, Alzheimer's disease, ALS/FTD, spinocerebellar ataxia type 1 (SCA1), spinocerebellar ataxia type 2 (SCA2), spinocerebellar ataxia type 3 (SCA3), spinocerebellar ataxia type 6 (SCA6), spinocerebellar ataxia type 7 (SCAT), spinocerebellar ataxia type 8 (SCA8), spinocerebellar ataxia type 10 (SCA10), spinocerebellar ataxia type 12 (SCA12), spinocerebellar ataxia type 17 (SCA17), Syndromic/non-syndromic X-linked mental retardation, Emery-Dreifuss muscular dystrophy type 2, familial partial lipodystrophy, limb girdle muscular dystrophy type 1B, dilated cardiomyopathy, familial partial lipodystrophy, Charcot-Marie-Tooth disorder type 2B1, mandibuloacral dysplasia, childhood progeria syndrome (Hutchinson-Gilford syndrome), Werner syndrome, Dilated cardiomyopathy (DCM), Hypertrophic cardiomyopathy (HCM), Restrictive cardiomyopathy (RCM), Left Ventricular Non-compaction (LVNC), Arrhythmogenic Right Ventricular Dysplasia (ARVD), takotsubo cardiomyopathy, Duchenne muscular dystrophy, Becker muscular dystrophy, Limb-girdle muscular dystrophy, Facioscapulohumeral muscular dystrophy, Congenital muscular dystrophy, Oculopharyngeal muscular dystrophy, Distal muscular dystrophy, Emery-Dreifuss muscular dystrophy, dementia, Parkinson's disease (PD), a PD-related disorder, Prion disease, a motor neuron disease (MND), Progressive bulbar palsy (PBP), Progressive muscular atrophy (PMA), Primary lateral sclerosis (PLS), Spinal muscular atrophy (SMA), a bladder cancer, a breast cancer, a colorectal cancer, a kidney cancer, a lung cancer, a lymphoma, a melanoma, an oral cancer, an ovarian cancer, an oropharyngeal cancer, a pancreatic cancer, a prostate cancer, a thyroid cancer, a uterine cancer, Down syndrome, Prader-Willi Syndrome (PWS), Bloom Syndrome, Cockayne Syndrome Type I-216400, Cockayne Syndrome Type III, Cockayne Syndrome Type I, Hutchinson-Gilford Progeria Syndrome, Mandibuloacral Dysplasia with Type A Lipodystrophy, Progeria, Adult Onset Progeroid Syndrome, Neonatal Rothmund-Thomson Syndrome, Seip Syndrome, Werner Syndrome, Replication Focus-Forming Activity 1, myotubular myopathy, Danon Disease, and/or centronuclear myopathy.

### BRIEF DESCRIPTION OF DRAWINGS

[0098] The following drawings form part of the present specification and are included to further demonstrate certain aspects of the present disclosure, which can be better understood by reference to one or more of these drawings in combination with the detailed description of specific embodiments presented herein.

[0099] FIG. 1 is a schematic illustrating the concept of a recombinant viral genome (e.g., rAAV or lentivirus) modified to include a transgene comprising a coding region of interest (e.g., encoding a therapeutic protein) under regulatory control by an alternatively-spliced exon (or an alternatively-spliced exon cassette). Step (b) shows the formation of a pre-mRNA which includes the coding region of interest and the alternatively-spliced exon. Step (c) shows the splicing-out or splicing-in of the alternatively-spliced exon based on one or more conditions (e.g., cell type, disease state, or other intracellular environmental signal). The splicing-out of the alternatively-spliced exon results in mRNA isoform 1 in (d), whereas the splicing-in of the alternatively-spliced exon (ASE) results in mRNA isoform 2 in (e). As shown in (g), the absence of the alternatively-spliced exon removes a positive or negative regulatory cis-element. The removal of a positive regulatory cis-element, such as a translation start signal, will result in the downregulation or decreased expression of the transgene, i.e., the reduced expression of the product encoded by the coding region of interest. However, the removal of a negative regulatory cis-element, such as mRNA degradation element, may lead to the upregulation or increased expression of the transgene, i.e., the increased expression of the product encoded by the coding region of interest. As shown in (h), the presence of the alternatively-spliced exon splices-in a positive or negative regulatory cis-element associated with the alternatively-spliced exon. The maintenance of a positive regulatory cis-element, such as a translation start signal, will result in the upregulation or increased expression of the transgene, i.e., the increased expression of the product encoded by the coding region of the transgene. However, the maintenance of a negative regulatory cis-element, such as mRNA degradation element, may lead to the downregulation or decreased expression of the transgene, i.e., the decreased expression of the product encoded by the coding region of the transgene.

[0100] FIG. 2 shows different models of alternative splicing which could be utilized in the nucleic acid vectors of the present disclosure. From top to bottom: a skipped exon model of alternative splicing, a retained intron model of alternative splicing, an alternative 5′ splice site model of alternative splicing, an alternative 3′ splice site model of alternative splicing, a mutually exclusive exon model of alternative splicing, and an alternative last exon model of alternative splicing. White regions represent constitutive exons throughout. Gray regions represent alternatively-spliced exons. One or more of the constitutive exons may be modified to contain a coding region of interest, e.g., a coding region of a transgene that encodes a therapeutic protein.

[0101] FIGS. 3A-3B show two schematics representing exemplary recombinant viral genomes. FIG. 3A shows a typical recombinant adeno-associated virus (rAAV) genome design. Two AAV inverted terminal repeats (ITRs) flank the transgene. The transgene may comprise a coding region of interest (e.g., encoding a therapeutic protein) under regulatory control of an alternatively-spliced exon (or cassette comprising an alternatively-spliced exon). In various embodiments, the cassettes (e.g., in the context of a transgene) may take on the architectures shown in any of FIG. 2 or 3-8, or any other suitable arrangement of elements so long as the alternatively-spliced exon is configured to regulate the expression of the coding region of interest of the transgene. FIG. 3B shows a typical recombinant lentivirus genome design. The 5′ and 3′ sequences of the lentivirus genome flank the packaging signal (PSI), rev response elements (RRE), and transgene. The transgene may comprise a coding region of interest (e.g., encoding a therapeutic protein) under regulatory control of an alternatively-spliced exon (or cassette comprising an alternatively-spliced exon). When transgenes are introduced using a lentivirus vector genome, the promoter and nucleotide sequence comprising the transgene sequence must be encoded on the minus strand of the lentivirus genome to prevent splicing during virus production and packaging. In various embodiments, the cassettes (e.g., in the context of a transgene) may take on the architectures shown in any of FIG. 2 or 3-8, or any other suitable arrangement of elements so long as the alternatively-spliced exon is configured to regulate the expression of the coding region of interest of the transgene.

[0102] FIGS. 4A-4C show three embodiments contemplated for the structural configuration of the cassettes (e.g., in the context of a transgene) that may inserted into a recombinant viral vector genome and which comprise at least (i) an alternatively-spliced exon and (ii) a coding region of interest (e.g., encoding a therapeutic protein) (or an exon comprising the coding region of interest), and wherein the alternatively-spliced exon comprises at least one positive or negative regulatory cis-element. Non-limiting examples of positive or negative regulatory cis-elements located within the alternatively-spliced exons can include, without limitation, a translation start codon, a translation stop codon, a binding site for an RNA binding protein that serves to positively regulate mRNA translation, a binding site for an RNA binding protein that serves to negatively regulate mRNA translation, a binding site for a nucleic acid molecule (e.g., an miRNA) that serves to positively regulate mRNA translation, a binding site for a nucleic acid molecule (e.g., an siRNA) that serves to negatively regulate mRNA stability or degradation, a binding site for an RNA binding protein that serves to positively regulate mRNA stability or degradation, a binding site for an RNA binding protein that serves to negatively regulate mRNA stability or degradation, a binding site for a nucleic acid molecule (e.g., an miRNA) that serves to positively regulate mRNA stability or degradation, or a binding site for a nucleic acid molecule (e.g., an siRNA) that serves to negatively regulate mRNA stability or degradation. This list of examples is not intended to place any limitation on the scope and meaning of the positive and negative cis-elements and the disclosure embraces any genetic element or region positioned within, or at least associated with, an alternatively-spliced exon which exerts a positive or negative control on the overall expression of a transgene (e.g., encoding a therapeutic protein). In some cases, the cis-element is within the alternatively-spliced exon, but in other cases, the cis-element is separate from, but at least associated with, the alternatively-spliced exon, such that it becomes spliced-in or spliced-out at the same time as the alternatively-spliced exon. In various embodiments, the cassettes (e.g., in the context of a transgene) may include one or more additional components, including one or more other constitutive exons, and one or more introns. In FIGS. 4A-4C, the constitutive exons not comprising the coding region of interest are represented by narrow rectangles, introns are represented as dashed lines, and the alternatively-spliced exons are represented as shaded narrow rectangles. The exon or exons comprising the coding region (or portions thereof in the case of where the coding region is split into separate exons) are indicated as solid thick white rectangles.

[0103] FIG. 4A is a schematic of a cassette (e.g., in the context of a transgene) embodiment whereby the alternatively-spliced exon is upstream of the exon encoding the coding region of interest. Said another way, in this embodiment, the alternatively-spliced exon is to the 5′ of the exon encoding the coding region of interest.

[0104] FIG. 4B is a schematic of a cassette (e.g., in the context of a transgene) embodiment whereby the alternatively-spliced exon is downstream of the exon encoding the coding region of interest. Said another way, in this embodiment, the alternatively-spliced exon is to the 3′ of the exon encoding the coding region of interest.

[0105] FIG. 4C is a schematic of a cassette (e.g., in the context of a transgene) embodiment whereby the alternatively-spliced exon is positioned between two separate exons encoding portions of the coding region of interest. Said another way, in this embodiment, the alternatively-spliced exon is between the exons encoding the portions of the coding region of interest.

[0106] FIGS. 5A-5G depict various embodiments of the general model of the cassettes (e.g., in the context of a transgene) of FIG. 4A. FIG. 5A depicts an embodiment of the “skipped exon model.” FIG. 5B depicts an embodiment of the “retained intron model.” FIG. 5C depicts an embodiment of the “alternative 5′ splice site model.” FIG. 5D depicts an embodiment of the “alternative 3′ splice site model.” FIG. 5E depicts an embodiment of the “mutually exclusive exon model.” FIG. 5F depicts an exemplary alternatively spliced transcript. FIG. 5G depicts an exemplary constitutively spliced transcript.

[0107] FIGS. 6A-6G depict various embodiments of the general model of the cassettes (e.g., in the context of a transgene) of FIG. 4B. FIG. 6A depicts an embodiment of the “alternative last exon model.” FIG. 6B depicts an embodiment of the “skipped exon model.” FIG. 6C depicts an embodiment of the “retained intron model.” FIG. 6D depicts an embodiment of the “alternative 5′ splice site model.” FIG. 6E depicts an embodiment of the “alternative 3′ splice site model.” FIG. 6F depicts an embodiment of the “mutually exclusive exon model.” FIG. 6G depicts an embodiment of the “alternative last exon model.”

[0108] FIGS. 7A-7F depict various embodiments of the general model of the cassettes (e.g., in the context of a transgene) of FIG. 4C. FIG. 7A depicts the “skipped exon model.” FIG. 7B depicts the “retained intron model.” FIG. 7C depicts “alternative 5′ splice site model.” FIG. 7D depicts the “alternative 3′ splice site model.” FIG. 7E depicts the “mutually exclusive exon model.” FIG. 7F depicts the “alternative last exon model.”

[0109] FIGS. 8A-8B show embodiments of the general model of the cassettes (e.g., in the context of a transgene). FIG. 8A shows an embodiment of the general model of the cassettes (e.g., in the context of a transgene) of FIG. 4A. In the approach shown, the cassette (e.g., in the context of a transgene) comprises a constitutive exon at the left, an alternatively-spliced exon comprising an ATG (an example of a positive regulatory cis-element) in the middle, and a constitutive exon comprising a coding region of interest (shown with the natural ATG start codon removed to eliminate translation of that exon without further positive control by the alternatively-spliced exon). Black lines indicate intronic sequences (e.g., the flanking introns of the alternatively-spliced exon). Alternative reading frames within the exon comprising the coding sequence may in some embodiments be removed, as appropriate. Under alternative splicing conditions, which are specific to the nature of the chosen alternatively-spliced exon, the alternatively-spliced exon will be included, and productive translation of the coding sequence will result. To the contrary, under homeostatic conditions (normal splicing conditions), only the constitutive exon will be included, the presence of the ATG start codon in the alternatively-spliced exon will be eliminated, and the coding sequence will not be translated. The upper dotted lines show the splicing pattern leading to a splicing-in of the alternatively-spliced exon (expression of the coding region). The lower dotted lines show the splicing pattern leading to a splicing-out of the alternative-spliced exon (no or reduced expression of the coding region). FIG. 8B shows an embodiment of the general model of the cassettes (e.g., in the context of a transgene) of FIG. 4C. In the approach shown, the cassette (e.g., in the context of a transgene) comprises an alternatively-spliced exon (shown in gray) positioned between two separate constitutive exons each comprising a portion of the desired coding region. The exon to the left comprises the 5′ end of the coding sequence and the exon to the right comprises the 3′ end of the coding region. An in-frame stop codon is inserted into the alternatively-spliced exon at a location which is >50 nucleotides upstream of the next downstream splice site. Under alternative splicing conditions, which are specific to the nature of the chosen alternatively-spliced exon, the alternatively-spliced exon will be included, and NMD (nonsense-mediated mRNA decay) will result. Under homeostatic conditions (normal splicing conditions), only the constitutive exon will be included, and the 5′ and 3′ ends of the coding sequence will be joined resulting in productive translation of the coding sequence. The upper dotted lines show the splicing pattern leading to a splicing-in of the alternatively-spliced exon (no or reduced expression of the coding region due to active NMD). The lower dotted lines show the splicing pattern leading to a splicing-out of the alternative-spliced exon (expression of the coding region).

[0110] FIG. 9 shows a configuration of a gene therapy cargo whose translation can be regulated by alternative splicing. Inclusion of an alternative exon that ends in “ATG” can lead to translation of the downstream coding sequence. Exclusion will prevent appropriate protein translation of the downstream coding sequence.

[0111] FIG. 10 shows a construct design for the screening of alternative exon cassettes with regulatory activity. The construct used the SMN1 exon 6 and intron 6/7 context. Test alternative exon cassettes were inserted between portions of SMN1 intron 6 and 7. An MHCK7 was used. The coding sequence was derived from the human MTM1 gene. The 3′ UTR contained an SV40 polyadenylation and cleavage site. AAV2 ITRs flanked the construct. Splice site scores of the flanking constitutive exons are listed.

[0112] FIG. 11 shows a strategy to prevent undesired translation of peptides from alternative reading frames of MTM1. Amino acids generated in the MTM1 reading frame are listed (e.g., GCT encodes Alanine); only the 5′ end of MTM1 sequence is shown. Substitutions that preserve MTM1 reading frame but terminate alternative reading frames are shown. Arrows denote point mutations made to generate stop codons that would terminate open reading frames in the +1 and +2 reading frames. Nucleic acid substitutions are denoted by lower-case letters.

[0113] FIG. 12 shows a strategy to preserve splice site strength following mutation of bases to introduce ATG to the ends of alternative exons by altering 5′ splice site sequences. Because the addition of ATG to the end of each alternative exon may change the splice site strength, intronic bases to were altered to maintain splice site strength and preserve splicing activity. All upstream ATGs were also removed from alternative exons. Splice site strengths were scored by MaxEntScan and are shown. Splice sites are listed for the endogenous sequence (top), the endogenous sequence altered such that ATG is introduced (middle), and a “compensated” splice site sequence (bottom). Nucleic acid substitutions are denoted by lower-case letters.

[0114] FIG. 13 shows a construct barcoding strategy. For the first round of screening, a barcode strategy was used in which synonymous mutations were made and used to identify each candidate alternative exon uniquely. Barcodes were ˜350 NT away from the splice site with the intent of not affecting splicing. Barcodes were comprised of 5 wobble positions and generated by randomly cloning in: AAY CTN AGA TTY GCN (SEQ ID NO: 101) (2*4*2*4=64 possibilities). Barcode sequences (each 5 nucleotides in length) are shown at the end of each row in parentheses.

[0115] FIGS. 14A-14C show percent spliced in (psi) values for each tested cassette exon in various tissues. Psi values were plotted in heart (H), tibialis anterior (TA), and liver (L). Data for tibialis anterior was obtained from animals injected intramuscularly, and data from the other tissues was obtained from animals injected intravenously. FIG. 14A shows data obtained from the following tested cassette exons (from left to right): ARFGAP2, BIN1, CAMK2B, and KIF13A. FIG. 14B shows data obtained from the following tested cassette exons (from left to right): KSR1, LGMN, NRAP, and PDLIM3. FIG. 14C shows data obtained from the following tested cassette exons (from left to right): PICALM, PKP2, and VPS39.

[0116] FIGS. 15A-15B show percent spliced in (psi) values for each tested exon in tibialis anterior at various times following injection. Psi values were plotted for each sample versus every other sample. The number following the dash indicates the replicate number for that particular week. FIG. 15A shows a first comparison of psi values obtained at different time points following injection. FIG. 15B shows a second comparison of psi values obtained at different time points following injection.

[0117] FIGS. 16A-16B show the ratios of RNA binding protein (RBP) RNA expression in heart vs. skeletal muscle, or vice-versa. RNA expression values for RNA binding proteins were obtained from publicly available databases. The ratio of expression in heart versus skeletal muscle was computed; the RBPs showing the strongest bias in either direction were plotted. FIG. 16A shows the RBPs which were found to be enriched in muscle tissue, relative to heart tissue. FIG. 16B shows the RBPs which were found to be depleted in muscle tissue, relative to heart tissue.

[0118] FIG. 17 shows that the intronic sequence upstream of BIN1 exon 11 is enriched for CAC motifs. Top: ˜250 nucleotides upstream of BIN1 exon 11 are shown. Every CAC motif is shown in bold text. Bottom: the last 34 bases of the intron are shown from human, rhesus macaque, mouse, dog, and elephant. Every species shown has 2 CAC motifs within this region except for dog.

[0119] FIG. 18 shows percent spliced in (psi) values for BIN1 exon 11 in human, rhesus macaque, and dog. Psi values for BIN1 exon 11 for these species were obtained from publicly available datasets and plotted. The dog data includes data from animals modeling XLMTM1, including those also being treated with AAV-MTM1. AAV low, mid, and high denotes AAV-MTM1 treatment in XLMTM1 dogs from Dupont et al. (2020).

[0120] FIG. 19 shows splice site variants which were considered in the high throughput screen to optimize the BIN1 exon 11 cassette. The endogenous BIN1 3′ splice site is listed (top), along with the endogenous BIN1 5′ splice site (second row from top), the endogenous BIN1 5′ splice site sequence altered such that ATG is introduced (third row from top), and the “compensated” version characterized in the first screen (bottom). Additional splice sites tested are listed below. Nucleic acid substitutions are denoted by lower-case letters.

[0121] FIG. 20 shows intronic variants which were considered in the high throughput screen to optimize the BIN1 exon 11 cassette. Sequence from the downstream intron of BIN1 exon 11 is shown (top). Putative MBNL binding sites (YGCY motifs) are bolded. Putative RBFOX binding sites (TGCATG) are underlined. Sequence that includes 4 possible alterations is shown (bottom). The alterations, denoted with lower-case letters, either generate additional MBNL binding sites (the first, second, and third alterations, from 5′ to 3′) or an additional RBFOX site (the fourth alteration). Consideration of 0, 1, 2, 3, or 4 alterations in all combinations yields 16 possible sequences to test.

[0122] FIG. 21 shows a strategy to use PCR amplicons to read the association between barcodes and variants (the codebook). Given short read Illumina sequencing (˜75 nucleotides), a PCR strategy was used to associate the downstream barcode with upstream sequence variants.

[0123] FIG. 22 shows the number of barcodes encoding each variant. A histogram of the number of barcodes encoding each variant is shown for the plasmid library. On average, ˜8 barcodes encode each variant.

[0124] FIGS. 23A-23C show scatters of percent spliced in (psi) values for each variant in different tissues. Each point represents the mean psi for each variant across all barcodes representing that variant. Data from selected tissues is shown. FIG. 23A shows scatter between 2 heart samples, which lies along the diagonal (indicating reproducibility). FIG. 23B shows scatter between 2 gastrocnemius samples, which also lies along the diagonal (indicating reproducibility). FIG. 23C shows scatter between heart and skeletal muscle samples, which lies above the diagonal. This is because psi for most variants is higher in skeletal muscle than in heart.

[0125] FIGS. 24A-24B show scatters of mean percent spliced in (psi) as computed across multiple animals. Each point represents the mean psi for each variant across multiple animals (n=4 for all tissues). FIG. 24A shows data obtained from tibialis anterior (y-axis) versus heart (x-axis) tissue. FIG. 24B shows data obtained from gastrocnemius (y-axis) versus heart (x-axis) tissue.

[0126] FIGS. 25A-25D show percent spliced in (psi) values as a function of splice site strength for selected samples. Psi values for each variant were grouped by 3′ or 5′ splice site strength; data is shown only for heart sample 1 and gastrocnemius sample 1. There is a trend such that strong splice sites tend to yield higher inclusion levels. FIG. 25A shows the 3′ splice site strength relative to the psi in heart tissue for heart sample 1. FIG. 25B shows the 5′ splice site strength relative to the psi in heart tissue for heart sample 1. FIG. 25C shows the 3′ splice site strength relative to the psi in gastrocnemius tissue for gastrocnemius sample 1. FIG. 25D shows the 5′ splice site strength relative to the psi in gastrocnemius tissue for gastrocnemius sample 1.

[0127] FIGS. 26A-26B show scatters of mean percent spliced in (psi) for each variant as computed across multiple animals when linked to a CAPN3 cargo. Each point represents the mean psi for each variant across multiple animals (n=4 for all tissues). FIG. 26A shows data obtained from tibialis anterior (y-axis) versus heart (x-axis) tissue. FIG. 26B shows data obtained from gastrocnemius (y-axis) versus heart (x-axis) tissue.

[0128] FIGS. 27A-27B show scatters of mean percent spliced in (psi) for each variant when linked to an MTM1 cargo versus a CAPN3 cargo. Each point represents the mean psi for each variant across multiple animals (n=4 for all tissues). The psi value for variants linked to the MTM1 cargo is shown on the x-axis and the psi value for the same variants linked to the CAPN3 cargo is shown on the y-axis. FIG. 27A shows data for heart tissue. FIG. 27B shows data for gastrocnemius tissue.

### DETAILED DESCRIPTION

[0129] The present disclosure relates to the observation that alternatively-spliced exons may be used in the context of viral vectors (e.g., AAV viral vectors or lentivirus viral vectors) to effectively regulate the expression of a coding region of interest (e.g., a coding region of a transgene that encodes a therapeutic protein). In certain aspects, the alternatively-spliced exons regulate the expression of a coding region of interest in a condition-sensitive manner (e.g., expression in one type of cell but not another, expression in a diseased condition, or expression in the presence of certain intracellular conditions). Accordingly, the present disclosure relates to a new approach for regulating expression of a transgene (or a coding region thereof) from a recombinant viral vector that couples alternatively-spliced exons with the expression of a coding region of interest (e.g., a coding region of a transgene encoding a therapeutic protein). The present disclosure describes a variety of exemplary configurations as to how to combine or otherwise pair the expression of a coding region of interest (or multiple portions of coding regions) with an alternatively-spliced exon, but any suitable arrangement or configuration is contemplated so long as the expression of the coding region of interest (or portions thereof) is configured to come under regulatory control of the alternatively-spliced exon.

[0130] A schematic representing the disclosed new approach for regulating expression of a transgene (or a coding region of a transgene, e.g., a transgene encoding a therapeutic protein) in a recombinant viral genome using alternatively-spliced exons is provided in FIG. 1. As shown in FIG. 1, a viral genome may be configured to include a transgene that comprises a coding region of interest (e.g., encoding a therapeutic protein) and an alternatively-spliced exon (or a cassette comprising an alternatively-spliced exon) which regulates the expression of the coding region of the transgene. In addition, a number of exemplary embodiments of recombinant nucleic acid molecule constructs that comprise an alternatively-spliced exon and a coding region of interest (e.g., encoding a therapeutic protein) are shown in FIG. 2. FIG. 3 depicts, in general, typical AAV and lentivirus vector constructs comprising a coding region of interest whose expression is driven by a promoter, and which further include the insertion (at any suitable location) of a nucleotide sequence comprising an alternatively-spliced exon (or a cassette comprising an alternatively-spliced exon) to further regulate the expression of the coding region (e.g., by controlling translation or mRNA homeostasis, e.g., mRNA levels). In some embodiments, the nucleotide sequence comprising an alternatively-spliced exon may be in the form of a “cassette.” Examples of this are provided in FIGS. 2 and 4-7.

[0131] Such constructs represent embodiments that enable the disclosed new approach for regulating transgene expression (e.g., the expression of a therapeutic protein) from recombinant viral vectors in a condition-sensitive manner, whereby the condition-sensitive expression is controlled by alternatively-spliced exons which are included in the recombinant genome of the expression vector in such a manner that imparts a level of control on the expression of a coding region of interest (e.g., encoding a therapeutic protein). It will be understood that alternatively-spliced exons are spliced-in or spliced-out in a manner that can be dependent on one or more environmental conditions, e.g., intracellular conditions, such as a disease state (e.g., cancer) or even a type of cell (e.g., a liver cell versus a neuron, each of which have different intracellular conditions), or the presence of an external factor (such as, for example, an administered agent). Thus, whether the alternatively-spliced exon is spliced-in or spliced-out can be dependent upon the condition of the cell in which the splicing machinery operates.

[0132] Turning to FIG. 1, a generalized schematic of a recombinant AAV is provided in (a) which comprises a transgene located between the left and right ITRs. The transgene is indicated as comprising a coding region of interest (e.g., which encodes a therapeutic protein) and an alternatively-spliced exon that regulates the expression of the transgene (or the product encoded by the coding region of interest). While the drawing depicts a recombinant AAV genome, other recombinant viral vector genomes may be used, such as recombinant lentivirus genomes. The recombinant viral genomes may be delivered or administered to subjects packaged in a viral vector, which refers to an infectious viral particle comprising a recombinant viral genome within a viral capsid, and in addition which may further include a lipid/protein envelope layer for enveloped viruses. In various embodiments, such as those provided in FIG. 2, or FIGS. 4-8, the coding region (or exon comprising the coding region) may be combined or arranged with the alternatively-spliced exon in the form of a transgene comprising any suitable arrangement of additional components, including one or more constitutive exons (i.e., those exons present in all spliced mRNA isoforms that result from the initial pre-mRNA transcript) and one or more introns. In other embodiments, an alternative exon cassette (comprising the alternatively-spliced exon) may be linked with or coupled to any coding region of interest to impart regulatory control on that coding region of interest.

[0133] The alternatively-spliced exon may be any naturally-occurring alternatively-spliced exon or any recombinant alternatively-spliced exon. A variety of configurations are contemplated, and no limitation is implied by FIG. 1 as to the possible configurations that may be employed. For instance, the alternatively-spliced exon may be located between two exons that each separately comprise a portion of the coding region of interest. In other instances, the alternatively-spliced exon is located outside of the exon comprising the coding region of interest. In such embodiments, the alternatively-spliced exon may be located downstream of the exon encoding the coding region of interest. In other such embodiments, the alternatively-spliced exon may be located upstream of the exon encoding the coding region of interest. The general descriptions of the configuration of the cassettes comprising the alternatively-spliced exon and the coding region of interest (or the exon comprising the coding region of interest) embrace any suitable configuration, including those embodiments described in FIGS. 2 and 4-8.

[0134] In FIG. 1, step (b) shows the formation of a pre-mRNA (i.e., a primary transcription product which has not yet been processed by splicing) which includes the coding region of interest and the alternatively-spliced exon. Step (c) shows the splicing-out or splicing-in of the alternatively-spliced exon based on one or more conditions (e.g., cell type, disease state, or other intracellular environmental signal). The splicing-out of the alternatively-spliced exon results in mRNA isoform 1 in (d), whereas the splicing-in of the alternatively-spliced exon results in mRNA isoform 2 in (e). As shown in (g), the absence of the alternatively-spliced exon removes a positive or negative regulatory cis-element. The removal of a positive regulatory cis-element, such as a translation start signal, will result in the downregulation or down-expression of the transgene, i.e., the reduced expression of the product encoded by the coding region of interest. However, the removal of a negative regulatory cis-element, such as mRNA degradation element, may lead to the upregulation or up-expression of the transgene, i.e., the increased expression of the product encoded by the coding region of interest. As shown in (h), the presence of the alternatively-spliced exon splices-in a positive or negative regulatory cis-element associated with the alternatively-spliced exon. The maintenance of a positive regulatory cis-element, such as a translation start signal, will result in the upregulation or up-expression of the transgene, i.e., the increased expression of the product encoded by the coding region of the transgene. However, the maintenance of a negative regulatory cis-element, such as mRNA degradation element, may lead to the downregulation or down-expression of the transgene, i.e., the decreased expression of the product encoded by the coding region of the transgene. Other configurations are also possible and contemplated herein and exemplified below in various embodiments provided in FIGS. 2-8.

[0135] In certain aspects, the disclosure provides methods and compositions for regulating gene expression using viral vectors comprising a recombinant viral genome described herein. Viral vectors can be used to deliver one or more transgenes (comprising a coding region of interest which encodes a protein of interest, such as a therapeutic protein) for therapeutic, diagnostic, or other purposes. In some aspects, expression of a transgene in a recombinant viral genome can be regulated using alternative splicing of an RNA expressed from the viral genome.

[0136] Thus, aspects of the disclosure relate to methods and compositions for regulating expression of a transgene (comprising a coding region of interest which encodes a protein of interest, such as a therapeutic protein) using viral vectors comprising a recombinant viral genome described herein. A recombinant viral genome can be engineered to include one or more exons (e.g., one or more of a constitutive exon, an alternatively-spliced exon, and/or engineered versions thereof) that (a) can be either spliced-in or spliced-out of a pre-mRNA encoded by the genome, and (b) include one or more positive or negative regulatory cis-elements that affect protein expression (e.g., mRNA stability and/or translation of the coding region of interest).

[0137] Different intron and exon configurations can be used to provide for alternatively-spliced exon splicing, as discussed in greater detail herein, and shown in FIG. 2 and FIGS. 4-8 as examples. Non-limiting examples include the following models of alternative splicing: skipped exons, retained introns, alternative 5′ splice sites, alternative 3′ splice sites, mutually exclusive exons, and alterative last exons as illustrated in FIGS. 2 and 4-8. Each of these different intron/exon configurations can be used to leverage alternatively-spliced exons which may, in some embodiments, include one or more positive or negative regulatory cis-elements that promote or limit expression of the coding region of interest. For example, such sequences may promote translation and/or stability, or inhibit or terminate RNA translation and/or promote RNA degradation. Such cis-acting elements may in some embodiments be sequences that form secondary structures (e.g., that slow translation), bind to one or more regulatory RNAs (e.g., siRNAs), and/or be targeted by one or more intracellular enzymes (e.g., nucleases).

[0138] It will be appreciated that different types of splice sites exist which may result in splicing under specific conditions. Such splice sites can be chosen for their ability to regulate splicing under conditions of interest. Alternatively or additionally, splice sites may be chosen based upon their relative strength, as calculated using a variety of published methods (see, e.g., Yeo & Burge (2004), Maximum entropy modeling of short sequence motifs with applications to RNA splicing signals, J. Comput. Biol., 11(2-3):377-94). Such relative strength may in some embodiments reflect the efficiency of recognition by the core spliceosomal machinery (e.g., U1 and U2 snRNPs). In some embodiments, splice sites may be altered to enhance or diminish recognition by the core spliceosomal machinery. Such alterations may be performed, in some embodiments, to achieve the desired regulatory behavior in conditions of interest. For example, splice sites may be used to make splicing responsive to certain endogenous or exogenous factors such that the alternative splicing of the DNA is specific to, such as, for example, certain tissues, certain diseases, certain intracellular conditions, etc. In some embodiments, splicing may be additionally or alternatively responsive to an exogenous agent (e.g., a small molecule, antibody, or other compound) which regulates splicing of the pre-mRNA.

[0139] Alternatively-spliced exons as described herein may in some embodiments be contained within an alternatively-spliced exon cassette, as shown in the various embodiments of FIGS. 2 and 4-8.

[0140] Thus, in some embodiments a recombinant viral genome of the present disclosure comprises a transgene comprising at least one alternatively-spliced exon (or “regulatory”) cassette. In some embodiments, a transgene comprising an alternatively-spliced exon cassette comprises at least one alternatively-spliced exon, intronic sequences flanking the alternatively-spliced exon, and an exon comprising a coding region of interest. However, a transgene comprising a regulatory cassette may in some embodiments also contain additional components, such as a constitutive exon, additional intronic sequences, or both. Accordingly, in some embodiments, a transgene comprising an alternatively-spliced exon cassette comprises any one or more of the following components: an alternatively-spliced exon, a flanking intron, an exon comprising a coding region of interest, and/or a constitutive exon.

[0141] In some aspects, alternative splicing regulation can be used to help control the expression of a coding region of interest encoded by a recombinant viral genome (e.g., an rAAV recombinant genome, a lentivirus recombinant genome). Thus, aspects of the invention relate to a method of regulating expression of a coding region of interest using a viral vector comprising a recombinant viral genome described herein. In some embodiments, the method comprises: (i) inserting into the recombinant viral genome at least one transgene comprising an alternatively-spliced exon cassette (e.g., such as any of those shown in FIGS. 2 and 4-8); (ii) introducing a heterologous start codon or part of a heterologous start codon at the 3′ end of the alternatively-spliced exon; (iii) disrupting or deleting all native start codons located 5′ to the heterologous start codon; and (iv) deleting a native start codon, or a portion thereof, from, and/or introducing heterologous stop codons into, the exon comprising a coding region of interest. In some embodiments, the constitutive exon, alternatively-spliced exon, and flanking intron are each located 5′ to the coding region of interest. In some embodiments, the method comprises: (i) inserting into the recombinant viral genome at least one transgene comprising an alternatively-spliced exon cassette; and (ii) introducing into the alternatively-spliced exon a heterologous, in-frame stop codon at least 50 nucleotides upstream of the next 5′ splice junction.

[0142] In some embodiments, the heterologous, in-frame stop codon elicits nonsense-mediated decay. In some embodiments, a transgene comprising an alternatively-spliced exon cassette comprises any one or more of the following components: an alternatively-spliced exon, a flanking intron, a coding region of interest, and/or a constitutive exon.

[0143] Accordingly, compositions and methods described herein can be useful to regulate expression of therapeutic transcripts in the context of viral vector-based treatments for diseases or disorders. Abnormal cellular regulation (e.g., abnormal regulation of intron splicing of one or more genes) can lead to changes in gene regulation and subsequent protein expression associated with a disease state. Some aspects of the invention therefore concern a method of treating a disease or condition in a subject comprising administering a viral vector of the disclosure to a subject, wherein the viral vector comprises a recombinant viral genome described herein. In some aspects, the present application provides compositions and methods that are useful for delivering genes that retain or restore therapeutically effective levels of regulation (e.g., therapeutically effective regulation of intron splicing).

[0144] In some aspects, a viral vector (e.g., an rAAV vector; a lentivirus vector, etc.) comprises a recombinant viral genome that includes a nucleic acid that encodes an RNA (e.g., an mRNA) comprising one or more introns. In some embodiments, splicing of at least one intron is regulated by one or more intracellular factor(s). Regulation of intron splicing can control the expression level of the RNA and/or of the type of RNA (e.g., of an RNA splice alternative) inside a cell.

### A. Definitions

[0145] Unless otherwise defined herein, all scientific and technical terms used in connection with the present disclosure shall have the meanings that are commonly understood by those of ordinary skill in the art. The meaning and scope of the terms are clear; however, in the event of any latent ambiguity, definitions provided herein take precedent over any dictionary or extrinsic definition. Further, unless otherwise required by context, singular terms shall include pluralities and plural terms shall include the singular. In this disclosure, the use of “or” means “and/or” unless stated otherwise. Furthermore, the use of the term “including,” as well as other forms, such as “includes” and “included,” is not limiting. Things described as “including” or “comprising” can also be configured as “consisting of” or similar language. Also, terms such as “element” or “component” encompass both elements and components comprising one unit and elements and components that comprise more than one subunit unless specifically stated otherwise.

[0146] Generally, nomenclatures used in connection with, and techniques of, cell and tissue culture, molecular biology, immunology, microbiology, genetics, and protein and nucleic acid chemistry and hybridization described herein are those well-known and commonly used in the art. The methods and techniques of the present disclosure are generally performed according to conventional methods well known in the art and as described in various general and more specific references that are cited and discussed throughout the present disclosure unless otherwise indicated. Enzymatic reactions and purification techniques are performed according to manufacturer's specifications, as commonly accomplished in the art or as described herein. The nomenclatures used in connection with, and the laboratory procedures and techniques of, analytical chemistry, synthetic organic chemistry, and medicinal and pharmaceutical chemistry described herein are those well-known and commonly used in the art. Standard techniques are used for chemical syntheses, chemical analyses, pharmaceutical preparation, formulation, and delivery, and treatment of subjects.

[0147] That the present disclosure may be more readily understood, select terms are defined below.

### (i) Transgene

[0148] As used herein, the term “transgene” refers to any recombinant gene or a segment thereof that includes a non-naturally occurring sequence. The non-naturally occurring sequence may in some embodiments be from a different organism, but it need not be. For example, in some embodiments a transgene is a recombinant gene, or segment thereof, from one organism or infectious agent (e.g., a virus) that is introduced into the genome of another organism or infectious agent. By contrast, in some embodiments, the transgene may contain segments of DNA taken from the same organism, but the segments are arranged in a non-natural configuration. In some embodiments, the non-naturally occurring sequence is an engineered non-naturally occurring sequence. As used herein, a transgene may comprise any combination of naturally-occurring and engineered DNA sequences. In some embodiments, the transgene comprises at least one coding region that encodes a polypeptide of interest (e.g., a therapeutic protein) or fragment thereof. The coding region that encodes a polypeptide of interest (e.g., a therapeutic protein) or fragment thereof may be alternately referred to herein as the “coding region of the transgene.”

[0149] A transgene may be introduced into the genome of another organism or infectious agent using recombinant DNA techniques. A transgene may include one or more coding regions of interest that encode a polypeptide of interest, e.g., a therapeutic protein. A transgene may include or may be modified to include one or more regulatory sequences, including, but not limited to, transcription regulatory sequences (e.g., promoter, enhancer, silencer, transcription factor binding sequence, 5′ UTR, or 3′ UTR), post-transcriptional regulatory sequences (e.g., acceptor/donor splicing sites and splicing regulatory sequences), and/or translation regulatory sequences (e.g., translation initiation signals, translation termination signals, mRNA degradation or decay signals, polyadenylation signals). In some embodiments, wherein a transgene is introduced into the genome of another organism using a recombinant adeno associated virus (AAV), the transgene comprises all components (e.g., exons, introns, regulatory sequences, etc.) which are located between the AAV inverted terminal repeat sequences (see, e.g., FIG. 3A).

[0150] In some embodiments, a transgene may be modified to comprise an alternatively-spliced exon, defined below, such that the regulation of the expression of the transgene—or of the product encoded by the coding region of the transgene—comes under control of the alternatively-spliced exon. The alternatively-spliced exon may be configured as a “cassette,” defined below.

### (ii) Regulatory Sequence

[0151] As used herein, a “regulatory sequence” or, equivalently, a “regulatory element,” may refer to a nucleotide sequence that regulates, directly or indirectly, any aspect of the expression of a gene or transgene, including regulatory sequences that effect transcription of a gene or transgene into one or more mRNAs, the processing of mRNA (e.g., the splicing of a pre-mRNA comprising exons and introns to produce one or more mRNA isoforms), and/or the translation of a coding region in a mRNA to form a polypeptide product.

[0152] Where a regulatory sequence or element is near, within, or otherwise proximal to a gene or transgene (or coding sequence thereof), the regulatory sequence may be referred to as a cis-acting regulatory sequence. This is in contrast to a trans acting regulatory sequence, which would be a regulatory sequence which is distal from a gene or transgene being regulated on the same or different nucleic acid molecule comprising a gene or transgene being regulated. Such cis-acting regulatory sequences may be referred to a “positive or negative regulatory cis-elements,” and, in certain embodiments, are located within an “alternatively-spliced exon.”

[0153] Non-limiting examples of positive or negative regulatory cis-elements can include, for instance, (1) a nucleotide sequence element that regulates, modulates, or otherwise controls the amount, stability, and/or degradation of an mRNA encoding a coding region of interest (or portions thereof); and/or (2) a nucleotide sequence element that regulates, modulates, or otherwise controls the translation of a coding region of interest (or portions thereof) encoded by an mRNA. Where positive or negative regulatory cis-elements are located within an alternatively-spliced exon, the splicing-in or splicing-out of the alternatively-spliced exons either retains or removes the positive or negative regulatory cis-element from a resulting post-spliced mRNA encoding the coding region of interest. Depending upon whether the alternatively-spliced exon is spliced-in or spliced-out, and then depending upon which one or more positive or negative regulatory cis-elements are associated with the alternatively-spliced exon, there will be a corresponding effect on the overall regulation of the expression of the transgene or a coding region of interest therein. Such effect may in some embodiments be that the expression level is upregulated or downregulated, or, for example, “turned-off” completely.

(iii) Alternatively-Spliced Exon

[0154] As will be understood, an “alternatively-spliced exon” or an “alternatively-regulated exon” or a “cassette exon” refers to certain exons which are either retained (e.g., spliced-in) or excluded (e.g., spliced-out) during post-transcriptional splicing of a pre-mRNA. Whether an alternatively-spliced exon is spliced-in or spliced-out may depend of a number of different factors, including, but not limited to one or more cellular conditions, such as the presence or absence of a disease state (e.g., cancer), type of cell (e.g., liver cell versus skeletal cell), other intracellular conditions, or an external engineered factor (e.g., the administration of an agent).

[0155] The differential splicing events result in different spliced transcripts (e.g., mRNA isoforms) that either retain or exclude the alternatively-spliced exon. Further, as disclosed herein, the alternatively-spliced exons may comprise one or more positive or negative regulatory cis-elements that exert a positive or negative regulatory control on the expression of a coding region of interest (or portions thereof). Alternatively-spliced exons may be found in nature in a naturally-occurring gene, or may be modified by changing or altering the sequence thereof, including adding or changing the splice site, and/or adding or changing a positive or negative regulatory cis-element. Such altered exons may be referred to as “recombinant” or “synthetic” exons. “Recombinant” or “synthetic” may in some embodiments include naturally occurring exons that have been placed into a heterologous gene (e.g., an unmodified exon placed into a non-natural context). In some embodiments, the cis-elements mediate localization to a specific cellular compartment, such as, for example, an organelle, the cytoskeleton, plasma membrane, the endoplasmic reticulum, the mitochondria, the nucleus, etc.

### (iv) Cassette

[0156] As used herein, the term “cassette” refers to any set of introns and/or exons (including an alternatively-spliced exon) capable of exhibiting a splicing pattern to produce different spliced transcript (e.g., mRNA isoforms).

[0157] In some embodiments, when the cassette comprises an alternatively-spliced exon and, in some embodiments, the intronic sequences (or portions thereof) flanking the alternatively-spliced exon, the cassette may be referred to as an “alternative splicing cassette” or equivalently, “alternatively-spliced exon cassette” or “alternative exon cassette.” When situated in an alternatively-spliced exon cassette, an alternative-spliced exon may be alternatively referred to as a “cassette exon.” For purposes of clarity, a “cassette,” and in particular, an “alternatively-spliced exon cassette,” may exclude a coding region of interest, but also may be configured to be operatively linked to any coding region of interest such that the alternatively-spliced exon cassette regulates the expression of the coding region of interest.

### (v) Additional Terms

[0158] As used herein, an “engineered intron” is an intron which comprises at least one modification, relative to a native intron. For example, an engineered intron may comprise one or more nucleotide deletions, and thus be truncated, relative to a native intron.

[0159] As used herein, an “engineered exon” is an exon which comprises at least one modification, relative to a native exon. For example, an engineered exon may comprise one or more nucleotide deletions, and thus be truncated, relative to a native exon.

[0160] As used herein, a “flanking” component (e.g., a flanking intron) refers to a component which is located upstream (e.g., 5′) or downstream (e.g., 3′) of a central component (e.g., an exon). A flanking component may in some embodiments be immediately adjacent to the central component, but that is not required by the methods and compositions of the present disclosure. For example, a central alternatively-spliced exon may, in some embodiments, be flanked by two introns, wherein such introns are immediately adjacent to the central alternatively-spliced exon. The same central alternatively-spliced exon may also be flanked by two additional exons, which are located upstream and downstream of the central alternatively-spliced exon, respectively, but which are not immediately adjacent to the central alternatively-spliced exon.

[0161] As used herein, a “constitutive exon” is an exon that is present in all spliced transcripts (e.g., mRNA isoforms) formed as a result of splicing a pre-mRNA transcript that is transcribed from a gene. A constitutive exon is therefore common to different mRNA isoforms of a gene.

[0162] Additional terms are defined throughout the disclosure.

### B. Alternative Splicing and Models Used Herein

[0163] Through alternative splicing of pre-mRNAs, individual mammalian genes often produce multiple mRNAs (i.e., mRNA isoforms) and resultant protein isoforms that may have related, distinct or even opposing functions. The mRNA and protein isoforms produced by alternative splicing (or equivalently, alternative processing) of primary RNA transcripts may differ in structure, function, localization or other properties. Alternative splicing in particular is known to affect more than half of all human genes, and has been proposed as a primary driver of the evolution of phenotypic complexity in mammals. The number of variants of a gene ranges from two to potentially thousands. The resulting proteins may exhibit different and sometimes antagonistic functional and structural properties, and may inhabit the same cell with the resulting phenotype representing a balance between their expression levels. Defects in splicing have been implicated in human diseases, including cancer.

[0164] Aspects of the invention utilize alternative splicing mechanisms as a method of regulating the expression of a transgene (e.g., encoding a therapeutic protein). However, unlike naturally occurring alternatively-spliced exons, the alternatively-spliced exons of the application do not necessarily result in alternative sequence isoforms of the encoded protein. In many embodiments, an alternatively-spliced exon impacts the level of protein expression without impacting the sequence of the protein that is expressed. That is, the alternatively-spliced exon is utilized as a means of regulation of the expression of the protein of interest. In some embodiments, retention of the alternatively-spliced exon in the spliced transcript results in the productive translation of a coding region of interest. In some embodiments, exclusion of the alternatively-spliced exon from the spliced transcript results in the coding region of interest not being translated (e.g., the alternatively-spliced exon is spliced out). In some embodiments, retention of the alternatively-spliced exon in the spliced transcript results in nonsense mediated decay. In some embodiments, exclusion of the alternatively-spliced exon from the spliced transcript results in the productive translation of the coding region of interest.

[0165] Thus, by manipulating the composition and arrangement of an alternatively-spliced exon cassette, a recombinant viral genome of the present disclosure comprising the alternatively-spliced exon cassette may behave in a predictable manner, and the transgene and/or coding region of interest may be expressed in specific conditions which are therapeutically beneficial (e.g., in a specific cell type, a specific tissue, a disease state, and/or upon an inflammatory response). Transgenes comprising alternatively-spliced exon cassettes may be designed according to any one of several non-limiting models of alternative splicing (shown in FIG. 2 or 4-8), each of which is specifically contemplated herein, in addition to other models of alternative splicing. Thus, aspects of the invention contemplate alternatively-spliced exon cassettes for regulating the expression of coding regions of interest (e.g., encoding therapeutic proteins).

[0166] In various aspects, the alternatively-spliced exons are spliced-in or spliced-out in a manner that is dependent upon one or more environmental cues, e.g., cell or tissue type, disease state, or intracellular conditions. The alternatively-spliced exons can be sourced from a naturally occurring gene or may be recombinant, for example, in order to add one or more genetic regulatory elements for influencing expression levels of the transgene and/or coding region of the transgene. Examples of alternatively-spliced exons are disclosed herein.

[0167] In various embodiments, the alternatively-spliced exons may comprise one or more regulatory sequences that modulate the expression of a coding sequence of interest. Such regulatory sequences may be referred to a cis-elements. Further, cis-elements that impart a positive regulatory control on a coding sequence of interest may be referred to as a positive regulatory cis-element. To the contrary, cis-elements that impart a negative regulatory control on a coding sequence of interest may be referred to as a negative regulatory cis-element.

[0168] Alternatively-spliced exons may be found in nature in a naturally-occurring genes, or may be modified by changing or altering the sequence thereof (e.g., derived from a naturally-occurring gene), including adding or changing the splice site, and/or adding or changing a positive or negative regulatory cis-element. The one or more positive or negative regulatory cis-elements may be located within an alternatively-spliced exon, and may influence the level of expression of a coding region of interest through positive and/or negative controls, and may include any regulatory sequence which exerts—as a consequence being spliced-in or spliced-out of the final mRNA—either a positive or negative regulation on the expression of the coding region.

[0169] FIG. 4 shows three non-limiting embodiments contemplated for the structural configuration of a cassette (e.g., comprised within a transgene) for use with a recombinant virus genome, wherein the cassette (e.g., comprised within a transgene) comprises an alternatively-spliced exon and a coding region, wherein the alternatively-spliced exon further comprises at least one positive or negative regulatory cis-element. Non-limiting examples of positive or negative regulatory cis-elements can include, for instance, (1) a nucleotide sequence element that regulates, modulates, or otherwise affects the stability and/or degradation of a mRNA; and (2) a nucleotide sequence element that regulates, modulates, or otherwise affects the translation of a mRNA into one or more encoded polypeptide products (e.g., a therapeutic product). Without limitation, positive or negative regulatory cis-elements may include, but are not limited to, a translation start codon, a translation stop codon, a binding site for an RNA binding protein that serves to positively regulate transgene expression, a binding site for an RNA binding protein that serves to negatively regulate transgene expression, a binding site for a nucleic acid molecule (e.g., an miRNA) that serves to positively regulate transgene expression, or a binding site for a nucleic acid molecule (e.g., an siRNA) that serves to negatively regulate transgene expression. This list of examples is not intended to place any limitation on the scope or meaning of the positive and negative regulatory cis-elements and the disclosure embraces any genetic element or region positioned within or at least associated with an alternatively-spliced exon which exerts a positive or negative control on the overall expression of a transgene (e.g., encoding a therapeutic protein).

[0170] In some embodiments, the one or more cis-elements can include, but are not limited to, a translation start codon, a translation stop codon, an siRNA binding site, a miRNA binding site, a sequence forming a stem-loop structure, a sequence forming an RNA dimerization motif, a sequence forming a hairpin structure, a sequence forming an RNA quadruplex, polypurine tract, a sequence forming a pair of kissing loops, and a sequence forming a tetraloop/tetraloop receptor pair. In some embodiments, cis-elements include binding sites recognized by regulatory elements, such as, for example, RNA binding proteins. In some embodiments, an RNA binding protein capable of exerting regulatory control once bound is an RNA binding protein described in Van Nostrand, et al. (2020), A large-scale binding and functional map of human RNA-binding proteins, Nature, 583: 711-719, which is herein incorporated by reference with respect to its description of RNA binding proteins.

[0171] In various embodiments, the cassettes (e.g., comprised within a transgene) may include one or more additional components, including one or more other constitutive exons, and one or more introns. In FIGS. 4A-4C, the constitutive exons not comprising the coding region of interest are represented by narrow rectangles, introns are represented as dashed lines, and the alternatively-spliced exons are represented as shaded narrow rectangles. In some embodiments, the exon or exons comprising the coding region (or portions thereof, in embodiments wherein the coding region is split into separate exons) are indicated as solid thick white rectangles. In other embodiments, the alternatively-spliced exon may contain portions of a coding region of interest.

[0172] FIG. 4A is a schematic of an embodiment wherein the alternatively-spliced exon is upstream of the exon encoding the coding region of interest. Said another way, in this embodiment, the alternatively-spliced exon is to the 5′ of the exon encoding the coding region of interest.

[0173] FIG. 4B is a schematic of an embodiment wherein the alternatively-spliced exon is downstream of the exon encoding the coding region of interest. Said another way, in this embodiment, the alternatively-spliced exon is to the 3′ of the exon encoding the coding region of interest.

[0174] FIG. 4C is a schematic of an embodiment wherein the alternatively-spliced exon is positioned between two separate exons encoding portions of the coding region of interest. Said another way, in this embodiment, the alternatively-spliced exon is between the exons encoding the portions of the coding region of interest.

[0175] Various specific embodiments of these general groups of configurations are further shown in FIGS. 3-8, and further described as follows.

[0176] In some embodiments, a transgene comprising an alternatively-spliced exon cassette comprises a polynucleotide sequence as set forth in any one of SEQ ID NOs: 45-55. In some embodiments, a transgene comprising an alternatively-spliced exon cassette comprises a polynucleotide sequence that is 90%, 91%, 92%, 93%, 94%, 95%, 96%, 97%, 98%, or 99% identical to any one of SEQ ID NOs: 45-55.

### (i) Skipped Exon Model of Alternative Splicing

[0177] In some embodiments, the nucleic acid vectors of the present invention comprise a transgene comprising an alternatively-spliced exon cassette comprising components which, when alternatively spliced, comprise a skipped exon model of alternative splicing (see, e.g., FIGS. 5A, 6B, and 7A).

[0178] Referencing the components as labeled in FIG. 5A, in some embodiments the transgene comprising an alternatively-spliced exon cassette comprises, in the 5′ to 3′ direction:
[0179] a nucleotide sequence comprising a first exonic sequence having a 5′ to 3′ orientation (a), wherein the first exonic sequence comprises a constitutive exon;
[0180] a nucleotide sequence comprising a first intronic sequence having a 5′ to 3′ orientation (b), wherein the first intronic sequence comprises at its 5′ end a 5′ splice donor site (c) and at its 3′ end a 3′ splice acceptor site (d);
[0181] a nucleotide sequence comprising a second exonic sequence having a 5′ to 3′ orientation (e), wherein the second exonic sequence comprises an alternatively-spliced exon comprising at its 3′ end a heterologous ATG start codon (f);
[0182] a nucleotide sequence comprising a second intronic sequence having a 5′ to 3′ orientation (g), wherein the second intronic sequence comprises at its 5′ end a 5′ splice donor site (h) and at its 3′ end a 3′ splice acceptor site (i); and
[0183] a nucleotide sequence comprising a coding region of interest having a 5′ to 3′ orientation (j), wherein the coding region of interest comprises at its 5′ end a modification comprising the removal of a native ATG start codon (k), and
[0184] wherein all native ATG start codons located upstream (e.g., 5′) of the heterologous ATG start codon (f) are mutated or deleted.

[0185] Referencing the components as labeled in FIG. 6B, in some embodiments the transgene comprising an alternatively-spliced exon cassette comprises, in the 5′ to 3′ direction:
[0186] a nucleotide sequence comprising a coding region of interest having a 5′ to 3′ orientation (a);
[0187] a nucleotide sequence comprising a first intronic sequence having a 5′ to 3′ orientation (b), wherein the first intronic sequence comprises at its 5′ end a 5′ splice donor site (c) and at its 3′ end a 3′ splice acceptor site (d);
[0188] a nucleotide sequence comprising a first exonic sequence having a 5′ to 3′ orientation (e), wherein the first exonic sequence comprises an alternatively-spliced exon comprising a positive or negative cis-acting element (f);
[0189] a nucleotide sequence comprising a second intronic sequence having a 5′ to 3′ orientation (g), wherein the second intronic sequence comprises at its 5′ end a 5′ splice donor site (h) and at its 3′ end a 3′ splice acceptor site (i); and
[0190] a nucleotide sequence comprising a second exonic sequence having a 5′ to 3′ orientation (j), wherein the exonic sequence comprises a constitutive exon.

[0191] Referencing the components as labeled in FIG. 7A, in some embodiments the transgene comprising an alternatively-spliced exon cassette comprises, in the 5′ to 3′ direction:
[0192] a nucleotide sequence comprising a first portion of a coding region of interest having a 5′ to 3′ orientation (a);
[0193] a nucleotide sequence comprising a first intronic sequence having a 5′ to 3′ orientation (b), wherein the first intronic sequence comprises at its 5′ end a 5′ splice donor site (c) and at its 3′ end a 3′ splice acceptor site (d);
[0194] a nucleotide sequence comprising an exonic sequence having a 5′ to 3′ orientation (e), wherein the exonic sequence comprises an alternatively-spliced exon comprising at its 3′ end a heterologous stop codon (f);
[0195] a nucleotide sequence comprising a second intronic sequence having a 5′ to 3′ orientation (g), wherein the second intronic sequence comprises at its 5′ end a 5′ splice donor site (h) and at its 3′ end a 3′ splice acceptor site (i); and
[0196] a nucleotide sequence comprising a second portion of a coding region of interest having a 5′ to 3′ orientation (j).

[0197] In some embodiments, retention of the alternatively-spliced exon in the spliced transcript results in expression of the coding region of interest. In some embodiments, retention of the alternatively-spliced exon in the spliced transcript does not result in expression of the coding region of interest. In some embodiments, retention of the alternatively-spliced exon in the spliced transcript results in nonsense-mediated decay. In some embodiments, retention of the alternatively-spliced exon in the spliced transcript does not result in nonsense-mediated decay. In some embodiments, retention of the alternatively-spliced exon in the spliced transcript results in expression of the coding region of interest, wherein expression of the coding region of interest is regulated by a positive or negative cis-acting element. In some embodiments, retention of the alternatively-spliced exon in the spliced transcript results in expression of the coding region of interest, wherein expression of the coding region of interest is not regulated by a positive or negative cis-acting element.

### (ii) Retained Intron Model of Alternative Splicing

[0198] In some embodiments, the nucleic acid vectors of the present invention comprise a transgene comprising an alternatively-spliced exon cassette comprising components which, when alternatively spliced, comprise a retained intron model of alternative splicing (see, e.g., FIGS. 5B, 6C, and 7B).

[0199] Referencing the components as labeled in FIG. 5B, in some embodiments the transgene comprising an alternatively-spliced exon cassette comprises, in the 5′ to 3′ direction:
[0200] a nucleotide sequence comprising a first exonic sequence having a 5′ to 3′ orientation (a), wherein the first exonic sequence comprises a constitutive exon;
[0201] a nucleotide sequence comprising a second exonic sequence having a 5′ to 3′ orientation (b), wherein the second exonic sequence comprises an alternatively-spliced exon comprising at its 3′ end a heterologous ATG start codon (c); and
[0202] a nucleotide sequence comprising a coding region of interest having a 5′ to 3′ orientation (d), wherein the coding region of interest comprises at its 5′ end a modification comprising the removal of a native ATG start codon (e), and
[0203] wherein all native ATG start codons located upstream (e.g., 5′) of the heterologous ATG start codon (c) are mutated or deleted.

[0204] Referencing the components as labeled in FIG. 6C, in some embodiments, the transgene comprising an alternatively-spliced exon cassette comprises, in the 5′ to 3′ direction:
[0205] a nucleotide sequence comprising a coding region of interest having a 5′ to 3′ orientation (a);
[0206] a nucleotide sequence comprising a first exonic sequence having a 5′ to 3′ orientation (b), wherein the first exonic sequence comprises an alternatively-spliced exon comprising a positive or negative cis-acting element (c); and
[0207] a nucleotide sequence comprising a second exonic sequence having a 5′ to 3′ orientation (d), wherein the second exonic sequence comprises a constitutive exon.

[0208] Referencing the components as labeled in FIG. 7B, in some embodiments the transgene comprising an alternatively-spliced exon cassette comprises, in the 5′ to 3′ direction:
[0209] a nucleotide sequence comprising a first portion of a coding region of interest having a 5′ to 3′ orientation (a);
[0210] a nucleotide sequence comprising a first exonic sequence having a 5′ to 3′ orientation (b), wherein the first exonic sequence comprises an alternatively-spliced exon comprising at its 3′ end a heterologous stop codon (c);
[0211] a nucleotide sequence comprising a second portion of a coding region of interest having a 5′ to 3′ orientation (d);
[0212] a nucleotide sequence comprising an intronic sequence having a 5′ to 3′ orientation (e), wherein the intronic sequence comprises at its 5′ end a 5′ splice donor site (f) and at its 3′ end a 3′ splice acceptor site (g); and
[0213] a nucleotide sequence comprising a second exonic sequence having a 5′ to 3′ orientation (h), wherein the second exonic sequence comprises a constitutive exon.

[0214] In some embodiments, retention of the alternative exon in the spliced transcript results in expression of the coding region of interest. In some embodiments, retention of the alternatively-spliced exon in the spliced transcript does not result in expression of the coding region of interest. In some embodiments, retention of the alternatively-spliced exon in the spliced transcript results in nonsense-mediated decay. In some embodiments, retention of the alternatively-spliced exon in the spliced transcript does not result in nonsense-mediated decay. In some embodiments, retention of the alternatively-spliced exon in the spliced transcript results in expression of the coding region of interest, wherein expression of the coding region of interest is regulated by a positive or negative cis-acting element. In some embodiments, retention of the alternatively-spliced exon in the spliced transcript results in expression of the coding region of interest, wherein expression of the coding region of interest is not regulated by a positive or negative cis-acting element.

(iii) Alternative 5′ Splice Site Model of Alternative Splicing

[0215] In some embodiments, the nucleic acid vectors of the present invention comprise a transgene comprising an alternatively-spliced exon cassette comprising components which, when alternatively spliced, comprise an alternative 5′ donor site model of alternative splicing (see, e.g., FIGS. 5C, 6D, and 7C).

[0216] Referencing the components as labeled in FIG. 5C, in some embodiments the transgene comprising an alternatively-spliced exon cassette comprises, in the 5′ to 3′ direction:
[0217] a nucleotide sequence comprising a first exonic sequence having a 5′ to 3′ orientation (a), wherein the first exonic sequence comprises a constitutive exon;
[0218] a nucleotide sequence comprising a second exonic sequence having a 5′ to 3′ orientation (b), wherein the second exonic sequence comprises an alternatively-spliced exon comprising at its 3′ end a heterologous ATG start codon (c);
[0219] a nucleotide sequence comprising an intronic sequence having a 5′ to 3′ orientation (d), wherein the intronic sequence comprises at its 5′ end a 5′ splice donor site (e) and at its 3′ end a 3′ splice acceptor site (f); and
[0220] a nucleotide sequence comprising a coding region of interest having a 5′ to 3′ orientation (g), wherein the coding region of interest comprises at its 5′ end a modification comprising the removal of a native ATG start codon (h), and
[0221] wherein all native ATG start codons located upstream (e.g., 5′) of the heterologous ATG start codon (c) are mutated or deleted.

[0222] Referencing the components as labeled in FIG. 6D, in some embodiments the transgene comprising an alternatively-spliced exon cassette comprises, in the 5′ to 3′ direction:
[0223] a nucleotide sequence comprising a coding region of interest having a 5′ to 3′ orientation (a);
[0224] a nucleotide sequence comprising a first exonic sequence having a 5′ to 3′ orientation (b), wherein the exonic sequence comprises an alternatively-spliced exon comprising a positive or negative cis-acting element (c);
[0225] a nucleotide sequence comprising an intronic sequence having a 5′ to 3′ orientation (d), wherein the intronic sequence comprises at its 5′ end a 5′ splice donor site (e) and at its 3′ end a 3′ splice acceptor site (f); and
[0226] a nucleotide sequence comprising a second exonic sequence having a 5′ to 3′ orientation (g), wherein the exonic sequence comprises a constitutive exon.

[0227] Referencing the components as labeled in FIG. 7C, in some embodiments the transgene comprising an alternatively-spliced exon cassette comprises, in the 5′ to 3′ direction:
[0228] a nucleotide sequence comprising a first portion of a transgene having a 5′ to 3′ orientation (a);
[0229] a nucleotide sequence comprising an exonic sequence having a 5′ to 3′ orientation (b), wherein the exonic sequence comprises an alternatively-spliced exon comprising at its 3′ end a heterologous stop codon (c);
[0230] a nucleotide sequence comprising an intronic sequence having a 5′ to 3′ orientation (d), wherein the intronic sequence comprises at its 5′ end a 5′ splice donor site (e) and at its 3′ end a 3′ splice acceptor site (f); and
[0231] a nucleotide sequence comprising a second portion of a transgene having a 5′ to 3′ orientation (g).

[0232] In some embodiments, retention of the alternatively-spliced exon in the spliced transcript results in expression of the coding region of interest. In some embodiments, retention of the alternatively-spliced exon in the spliced transcript does not result in expression of the coding region of interest. In some embodiments, retention of the alternatively-spliced exon in the spliced transcript results in nonsense-mediated decay. In some embodiments, retention of the alternatively-spliced exon in the spliced transcript does not result in nonsense-mediated decay. In some embodiments, retention of the alternatively-spliced exon in the spliced transcript results in expression of the coding region of interest, wherein expression of the coding region of interest is regulated by a positive or negative cis-acting element. In some embodiments, retention of the alternatively-spliced exon in the spliced transcript results in expression of the coding region of interest, wherein expression of the coding region of interest is not regulated by a positive or negative cis-acting element.

### (iv) Alternative 3′ Splice Site Model of Alternative Splicing

[0233] In some embodiments, the nucleic acid vectors of the present invention comprise a transgene comprising an alternatively-spliced exon cassette comprising components which, when alternatively spliced, comprise an alternative 3′ donor site model of alternative splicing (see, e.g., FIGS. 5D, 6E, and 7D).

[0234] Referencing the components as labeled in FIG. 5D, in some embodiments the transgene comprising an alternatively-spliced exon cassette comprises, in the 5′ to 3′ direction:
[0235] a nucleotide sequence comprising a first exonic sequence having a 5′ to 3′ orientation (a), wherein the first exonic sequence comprises a constitutive exon;
[0236] a nucleotide sequence comprising an intronic sequence having a 5′ to 3′ orientation (b), wherein the intronic sequence comprises at its 5′ end a 5′ splice donor site (c) and at its 3′ end a 3′ splice acceptor site (d);
[0237] a nucleotide sequence comprising a second exonic sequence having a 5′ to 3′ orientation (e), wherein the second exonic sequence comprises an alternatively-spliced exon comprising at its 3′ end a heterologous ATG start codon (f); and
[0238] a nucleotide sequence comprising a coding region of interest having a 5′ to 3′ orientation (g), wherein the coding region of interest comprises at its 5′ end a modification comprising the removal of a native ATG start codon (h),
[0239] wherein all native ATG start codons located upstream (e.g., 5′) of the heterologous ATG start codon (f) are mutated or deleted.

[0240] Referencing the components as labeled in FIG. 6E, in some embodiments the transgene comprising an alternatively-spliced exon cassette comprises, in the 5′ to 3′ direction:
[0241] a nucleotide sequence comprising a coding region of interest having a 5′ to 3′ orientation (a);
[0242] a nucleotide sequence comprising an intronic sequence having a 5′ to 3′ orientation (b), wherein the intronic sequence comprises at its 5′ end a 5′ splice donor site (c) and at its 3′ end a 3′ splice acceptor site (d);
[0243] a nucleotide sequence comprising an exonic sequence having a 5′ to 3′ orientation (e), wherein the exonic sequence comprises an alternatively-spliced exon comprising a positive or negative cis-acting element (f); and
[0244] a nucleotide sequence comprising a second exonic sequence having a 5′ to 3′ orientation (g), wherein the exonic sequence comprises a constitutive exon.

[0245] Referencing the components as labeled in FIG. 7D, in some embodiments the transgene comprising an alternatively-spliced exon cassette comprises, in the 5′ to 3′ direction:
[0246] a nucleotide sequence comprising a first portion of a coding region of interest having a 5′ to 3′ orientation (a);
[0247] a nucleotide sequence comprising a first intronic sequence having a 5′ to 3′ orientation (b), wherein the first intronic sequence comprises at its 5′ end a 5′ splice donor site (c) and at its 3′ end a 3′ splice acceptor site (d);
[0248] a nucleotide sequence comprising a first exonic sequence having a 5′ to 3′ orientation (e), wherein the first exonic sequence comprises an alternatively-spliced exon comprising at its 3′ end a heterologous stop codon (f);
[0249] a nucleotide sequence comprising a second portion of a coding region of interest having a 5′ to 3′ orientation (g);
[0250] a nucleotide sequence comprising a second intronic sequence having a 5′ to 3′ orientation (h), wherein the second intronic sequence comprises at its 5′ end a 5′ splice donor site (i) and at its 3′ end a 3′ splice acceptor site (j); and
[0251] a nucleotide sequence comprising a second exonic sequence having a 5′ to 3′ orientation (k), wherein the second exonic sequence comprises a constitutive exon.

[0252] In some embodiments, retention of the alternatively-spliced exon in the spliced transcript results in expression of the coding region of interest. In some embodiments, retention of the alternatively-spliced exon in the spliced transcript does not result in expression of the coding region of interest. In some embodiments, retention of the alternatively-spliced exon in the spliced transcript results in nonsense-mediated decay. In some embodiments, retention of the alternatively-spliced exon in the spliced transcript does not result in nonsense-mediated decay. In some embodiments, retention of the alternatively-spliced exon in the spliced transcript results in expression of the coding region of interest, wherein expression of the coding region of interest is regulated by a positive or negative cis-acting element. In some embodiments, retention of the alternatively-spliced exon in the spliced transcript results in expression of the coding region of interest, wherein expression of the coding region of interest is not regulated by a positive or negative cis-acting element.

### (v) Mutually Exclusive Exon Model of Alternative Splicing

[0253] In some embodiments, the nucleic acid vectors of the present invention comprise a transgene comprising an alternatively-spliced exon cassette comprising components which, when alternatively spliced, comprise a mutually exclusive exon model of alternative splicing (see, e.g., FIGS. 5E, 6F, and 7E).

[0254] Referencing the components as labeled in FIG. 5E, in some embodiments the transgene comprising an alternatively-spliced exon cassette comprises, in the 5′ to 3′ direction:
[0255] a nucleotide sequence comprising a first exonic sequence having a 5′ to 3′ orientation (a), wherein the first exonic sequence comprises a constitutive exon;
[0256] a nucleotide sequence comprising a first intronic sequence having a 5′ to 3′ orientation (b), wherein the first intronic sequence comprises at its 5′ end a 5′ splice donor site (c) and at its 3′ end a 3′ splice acceptor site (d);
[0257] a nucleotide sequence comprising a second exonic sequence having a 5′ to 3′ orientation (e), wherein the second exonic sequence comprises an alternatively-spliced exon comprising at its 3′ end a heterologous ATG start codon (f);
[0258] a nucleotide sequence comprising a second intronic sequence having a 5′ to 3′ orientation (g), wherein the second intronic sequence comprises at its 5′ end a 5′ splice donor site (h) and at its 3′ end a 3′ splice acceptor site (i);
[0259] a nucleotide sequence comprising a third exonic sequence having a 5′ to 3′ orientation (j), wherein the third exonic sequence comprises an alternatively-spliced exon;
[0260] a nucleotide sequence comprising a third intronic sequence having a 5′ to 3′ orientation (k), wherein the third intronic sequence comprises at its 5′ end a 5′ splice donor site (1) and at its 3′ end a 3′ splice acceptor site (m); and
[0261] a nucleotide sequence comprising a coding region of interest having a 5′ to 3′ orientation (n), wherein the coding region of interest comprises at its 5′ end a modification comprising the removal of a native ATG start codon (o),
[0262] wherein all native ATG start codons located upstream (e.g., 5′) of the heterologous ATG start codon (f) are mutated or deleted.

[0263] Referencing the components as labeled in FIG. 6F, in some embodiments, the transgene comprising an alternatively-spliced exon cassette comprises, in the 5′ to 3′ direction:
[0264] a nucleotide sequence comprising a coding region of interest having a 5′ to 3′ orientation (a);
[0265] a nucleotide sequence comprising a first intronic sequence having a 5′ to 3′ orientation (b), wherein the first intronic sequence comprises at its 5′ end a 5′ splice donor site (c) and at its 3′ end a 3′ splice acceptor site (d);
[0266] a nucleotide sequence comprising a first exonic sequence having a 5′ to 3′ orientation (e), wherein the first exonic sequence comprises a first alternatively-spliced exon comprising a positive or negative cis-acting element (f);
[0267] a nucleotide sequence comprising a second intronic sequence having a 5′ to 3′ orientation (g), wherein the second intronic sequence comprises at its 5′ end a 5′ splice donor site (h) and at its 3′ end a 3′ splice acceptor site (i);
[0268] a nucleotide sequence comprising a second exonic sequence having a 5′ to 3′ orientation (j), wherein the second exonic sequence comprises a second alternatively-spliced exon;
[0269] a nucleotide sequence comprising a third intronic sequence having a 5′ to 3′ orientation (k), wherein the third intronic sequence comprises at its 5′ end a 5′ splice donor site (1) and at its 3′ end a 3′ splice acceptor site (m); and a nucleotide sequence comprising a third exonic sequence having a 5′ to 3′ orientation (n), wherein the third exonic sequence comprises a constitutive exon.

[0270] Referencing the components as labeled in FIG. 7E, in some embodiments the transgene comprising an alternatively-spliced exon cassette comprises, in the 5′ to 3′ direction:
[0271] a nucleotide sequence comprising a first portion of a coding region of interest having a 5′ to 3′ orientation (a);
[0272] a nucleotide sequence comprising a first intronic sequence having a 5′ to 3′ orientation (b), wherein the first intronic sequence comprises at its 5′ end a 5′ splice donor site (c) and at its 3′ end a 3′ splice acceptor site (d);
[0273] a nucleotide sequence comprising a first exonic sequence having a 5′ to 3′ orientation (e), wherein the first exonic sequence comprises an alternatively-spliced exon comprising at its 3′ end a heterologous stop codon (f);
[0274] a nucleotide sequence comprising a second intronic sequence having a 5′ to 3′ orientation (g), wherein the second intronic sequence comprises at its 5′ end a 5′ splice donor site (h) and at its 3′ end a 3′ splice acceptor site (i);
[0275] a nucleotide sequence comprising a second exonic sequence having a 5′ to 3′ orientation (j), wherein the second exonic sequence comprises an alternatively-spliced exon;
[0276] a nucleotide sequence comprising a third intronic sequence having a 5′ to 3′ orientation (k), wherein the third intronic sequence comprises at its 5′ end a 5′ splice donor site (1) and at its 3′ end a 3′ splice acceptor site (m); and
[0277] a nucleotide sequence comprising a second portion of a coding region of interest having a 5′ to 3′ orientation (n).

[0278] In some embodiments, retention of the alternatively-spliced exon in the spliced transcript results in expression of the coding region of interest. In some embodiments, retention of the alternatively-spliced exon in the spliced transcript does not result in expression of the coding region of interest. In some embodiments, retention of the alternatively-spliced exon in the spliced transcript results in nonsense-mediated decay. In some embodiments, retention of the alternatively-spliced exon in the spliced transcript does not result in nonsense-mediated decay. In some embodiments, retention of the alternatively-spliced exon in the spliced transcript results in expression of the coding region of interest, wherein expression of the coding region of interest is regulated by a positive or negative cis-acting element. In some embodiments, retention of the alternatively-spliced exon in the spliced transcript results in expression of the coding region of interest, wherein expression of the coding region of interest is not regulated by a positive or negative cis-acting element.

### (vi) Alternative Last Exon Model of Alternative Splicing

[0279] In some embodiments, the nucleic acid vectors of the present invention comprise a transgene comprising an alternatively-spliced exon cassette comprising components which, when alternatively spliced, comprise an alternative last exon model of alternative splicing (see, e.g., FIGS. 6A, 6G, and 7F).

[0280] Referencing the components as labeled in FIG. 6A, in some embodiments the transgene comprising an alternatively-spliced exon cassette comprises, in the 5′ to 3′ direction:
[0281] a nucleotide sequence comprising a first exonic sequence having a 5′ to 3′ orientation (a), wherein the first exonic sequence comprises a constitutive exon;
[0282] a nucleotide sequence comprising a first intronic sequence having a 5′ to 3′ orientation (b), wherein the first intronic sequence comprises at its 5′ end a 5′ splice donor site (c) and at its 3′ end a 3′ splice acceptor site (d);
[0283] a nucleotide sequence comprising a coding region of interest having a 5′ to 3′ orientation (e);
[0284] a nucleotide sequence comprising a second intronic sequence having a 5′ to 3′ orientation (f), wherein the second intronic sequence comprises at its 5′ end a 5′ splice donor site (g) and at its 3′ end a 3′ splice acceptor site (h); and
[0285] a nucleotide sequence comprising a second exonic sequence having a 5′ to 3′ orientation (i), wherein the second exonic sequence comprises an alternatively-spliced exon.

[0286] Referencing the components as labeled in FIG. 6G, in some embodiments the transgene comprising an alternatively-spliced exon cassette comprises, in the 5′ to 3′ direction:
[0287] a nucleotide sequence comprising a coding region of interest having a 5′ to 3′ orientation (a);
[0288] a nucleotide sequence comprising a first intronic sequence having a 5′ to 3′ orientation (b), wherein the first intronic sequence comprises at its 5′ end a 5′ splice donor site (c) and at its 3′ end a 3′ splice acceptor site (d);
[0289] a nucleotide sequence comprising a first exonic sequence having a 5′ to 3′ orientation (e), wherein the first exonic sequence comprises an alternatively-spliced exon comprising a positive or negative cis-acting element (f);
[0290] a nucleotide sequence comprising a second intronic sequence having a 5′ to 3′ orientation (g), wherein the second intronic sequence comprises at its 5′ end a 5′ splice donor site (h) and at its 3′ end a 3′ splice acceptor site (i);
[0291] a nucleotide sequence comprising a second exonic sequence having a 5′ to 3′ orientation (j), wherein the second exonic sequence comprises a constitutive exon.

[0292] Referencing the components as labeled in FIG. 7F, in some embodiments the transgene comprising an alternatively-spliced exon cassette comprises, in the 5′ to 3′ direction:
[0293] a nucleotide sequence comprising a first portion of a transgene having a 5′ to 3′ orientation (a);
[0294] a nucleotide sequence comprising a first intronic sequence having a 5′ to 3′ orientation (b), wherein the first intronic sequence comprises at its 5′ end a 5′ splice donor site (c) and at its 3′ end a 3′ splice acceptor site (d);
[0295] a nucleotide sequence comprising a first exonic sequence having a 5′ to 3′ orientation (e), wherein the first exonic sequence comprises an alternatively-spliced exon comprising at its 3′ end a heterologous stop codon (f);
[0296] a nucleotide sequence comprising a second intronic sequence having a 5′ to 3′ orientation (g), wherein the second intronic sequence comprises at its 5′ end a 5′ splice donor site (h) and at its 3′ end a 3′ splice acceptor site (i);
[0297] a nucleotide sequence comprising a second exonic sequence having a 5′ to 3′ orientation (j), wherein the second exonic sequence comprises a constitutive exon;
[0298] a nucleotide sequence comprising a third intronic sequence having a 5′ to 3′ orientation (k), wherein the third intronic sequence comprises at its 5′ end a 5′ splice donor site (1) and at its 3′ end a 3′ splice acceptor site (m); and
[0299] a nucleotide sequence comprising a second portion of a coding region of interest having a 5′ to 3′ orientation (n).

[0300] In some embodiments, retention of the alternatively-spliced exon in the spliced transcript results in expression of the coding region of interest. In some embodiments, retention of the alternatively-spliced exon in the spliced transcript does not result in expression of the coding region of interest. In some embodiments, retention of the alternatively-spliced exon in the spliced transcript results in nonsense-mediated decay. In some embodiments, retention of the alternatively-spliced exon in the spliced transcript does not result in nonsense-mediated decay. In some embodiments, retention of the alternatively-spliced exon in the spliced transcript results in expression of the coding region of interest, wherein expression of the coding region of interest is regulated by a positive or negative cis-acting element. In some embodiments, retention of the alternatively-spliced exon in the spliced transcript results in expression of the coding region of interest, wherein expression of the coding region of interest is not regulated by a positive or negative cis-acting element.

### C. Components of the Recombinant Vector Genomes

[0301] In some embodiments, a nucleic acid vector (e.g., a viral vector) of the present invention comprises a transgene comprising at least one alternatively-spliced exon cassette as described herein. Nucleic acid vectors or transgenes may have one alternatively-spliced exon cassette, or multiple such cassettes. In some embodiments, a nucleic acid vector or transgene comprises 1, 2, 3, 4, 5, 6, 7, 8, 9, 10, 11, 12, 13, 14, or 15, or more alternatively-spliced exon cassettes. A transgene comprising an alternatively-spliced exon cassette may, in some embodiments, comprise any one or more of the following components: an alternatively-spliced exon, an intron (e.g., a flanking intron), an exon comprising a coding region of interest, and/or a constitutive exon. In some embodiments, transgene comprising an alternatively-spliced exon cassette comprises an alternatively-spliced exon, a flanking intron, and an exon comprising a coding region of interest (wherein, in some embodiments, the coding region of interest may be split into portions across two or more exons).

### (i) Alternatively-Spliced Exons

[0302] In some embodiments, a nucleic acid vector or transgene comprises an alternatively-spliced exon cassette, wherein the alternatively-spliced exon cassette comprises among other components at least one alternatively-spliced exon. In some embodiments, the alternatively-spliced exon cassette comprises 1, 2, 3, or 4 alternatively-spliced exons. In some other embodiments, the alternatively-spliced exon cassette comprises 1, 2, 3, 4, 5, 6, 7, 8, 9, 10, 11, 12, 13, 14, 15, 16, 17, 18, 19, 20, 21, 22, 23, 24, or 25 alternatively-spliced exons. In some embodiments, wherein the alternatively-spliced exon cassette comprises more than one alternatively-spliced exon, the alternatively-spliced exons are adjacent. In some embodiments, wherein the alternatively-spliced exon cassette comprises more than one alternatively-spliced exon, the alternatively-spliced exons are not adjacent.

[0303] In some embodiments, the alternatively-spliced exon is synthetic or recombinant. In some embodiments, the alternatively-spliced exon is considered to be synthetic or recombinant because it undergoes one or more nucleic acid modifications, relative to the wild-type alternatively-spliced exon. A nucleic acid modification may be a substitution or deletion of one or more nucleotides that form the nucleic acid sequence of the alternatively-spliced exon.

[0304] In some embodiments, an alternative exon comprises an ATG start codon at its 3′ end. In some embodiments, the “3′ end” comprises the 1, 2, or 3 nucleic acids lying at the 3′ end of the alternative exon. As will be understood, in some embodiments a wild-type or naturally occurring alternative exon may comprise an ATG start codon at its 3′ end. In such embodiments, the alternative exon may comprise nucleic acid modifications unrelated to the insertion of a heterologous start codon at the 3′ end of the alternative exon. However, it will be further understood that in some embodiments a wild-type or naturally occurring alternative exon may not comprise an ATG start codon at its 3′ end. In such embodiments, modifications are made to the 3′ end of the alternative exon to introduce a heterologous start codon, such that when the alternative exon is spliced-in or retained in the spliced transcript, the downstream coding sequence is translated as a full-length protein. As will be understood, in some embodiments 1, 2, or 3 nucleic acid substitutions may be necessary in order to introduce the heterologous ATG start codon to the 3′ end of the alternative exon, depending on the sequence which is present at the 3′ end of the wild-type or naturally occurring alternative exon. In such embodiments, the 3′ end of the alternatively-spliced exon comprises 1 nucleotide substitution, relative to the wild-type alternatively-spliced exon, to form the ATG start codon. In such embodiments, the 3′ end of the alternatively-spliced exon comprises 2 nucleotide substitutions, relative to the wild-type alternatively-spliced exon, to form the ATG start codon. In such embodiments, the 3′ end of the alternatively-spliced exon comprises 3 nucleotide substitutions, relative to the wild-type alternatively-spliced exon, to form the ATG start codon.

[0305] In some embodiments, the modification comprises the insertion of a heterologous start codon or part of a heterologous start codon at the 3′ end of the alternatively-spliced exon (e.g., 1-3 nucleic acids are added to the 3′ end of the alternatively-spliced exon, rather than substituted, to form an ATG start codon).

[0306] In some embodiments, an alternative exon comprises part of an ATG start codon at its 3′ end. In some embodiments, an alternative exon may comprise, for example, “A” as the last nucleic acid, or “AT” as the last two nucleic acids, which formulate the 3′ end of the alternative exon. In such embodiments, the remainder of the ATG start codon may lie at the 5′ end of an exon lying immediately downstream of the alternative exon. For example, in some embodiments the alternative exon may comprise “A” as the last nucleic acid which formulates the 3′ end of the alternative exon, and the exon lying immediately downstream of the alternative exon may comprise “TG” as the first two nucleic acids which formulate the 5′ end of the downstream exon. In some embodiments, the alternative exon may comprise “AT” as the last two nucleic acids which formulate the 3′ end of the alternative exon, and the exon lying immediately downstream of the alternative exon may comprise “G” as the first nucleic acid which formulates the 5′ end of the downstream exon. In some embodiments, the ATG formed as a result of the splicing together of the alternative exon and the exon lying immediately downstream of the alternative exon initiates translation of the exon lying immediately downstream of the alternative exon. In some embodiments, the exon lying immediately downstream of the alternative exon may be, for example, the coding region of the transgene (e.g., an MTM1 coding region).

[0307] In some embodiments, an alternative exon comprises an ATG start codon, or part of an ATG start codon, within the nucleic acid sequence of the alternative exon (e.g., not at the 3′ end of the alternative exon). In some embodiments, the ATG start codon is in the same reading frame as the coding region of interest. In some embodiments, the ATG start codon is within up to 4, 5, 6, 7, 8, 9, 10, 11, 12, 13, 14, 15, 16, 17, 18, 19, 20, 21, 22, 23, 24, 25, 26, 27, 28, 29, or 30 nucleotides upstream of the 3′ end of the alternative-spliced exon. In some embodiments, the ATG start codon is within 4-6, 5-7, 6-8, 7-9, 8-10, 9-11, 10-12, 13-15, 14-16, 15-17, 16-18, 17-19, 18-20, 19-21, 20-22, 21-23, 22-24, 23-25, 24-26, 25-27, 26-28, 27-29, or 28-30 nucleotides upstream of the 3′ end of the alternative-spliced exon. In some embodiments, the ATG start codon is within 4-12, 8-16, 12-20, 16-24, or 20-30 nucleotides upstream of the 3′ end of the alternative-spliced exon. In some embodiments, the ATG start codon is within up to 4, 5, 6, 7, 8, 9, 10, 11, 12, 13, 14, 15, 16, 17, 18, 19, 20, 21, 22, 23, 24, 25, 26, 27, 28, 29, or 30 nucleotides upstream of the 3′ end of the alternative-spliced exon and is in the same reading frame as the coding region of interest. In some embodiments, the ATG start codon is within 4-6, 5-7, 6-8, 7-9, 8-10, 9-11, 10-12, 13-15, 14-16, 15-17, 16-18, 17-19, 18-20, 19-21, 20-22, 21-23, 22-24, 23-25, 24-26, 25-27, 26-28, 27-29, or 28-30 nucleotides upstream of the 3′ end of the alternative-spliced exon and is in the same reading frame as the coding region of interest. In some embodiments, the ATG start codon is within 4-12, 8-16, 12-20, 16-24, or 20-30 nucleotides upstream of the 3′ end of the alternative-spliced exon and is in the same reading frame as the coding region of interest.

[0308] In some embodiments, wherein the alternative exon comprises 1, 2, or 3 nucleic acid substitutions at the 3′ end to result in a heterologous ATG start codon (e.g., if the wild-type alternatively-spliced exon does not comprise an ATG start codon at its 3′ end), the strength of the 5′ splice site of the alternative exon may be diminished, relative to the strength of the 5′ splice site strength of the wild-type or naturally occurring alternative exon. In such embodiments, one or more additional modifications made be made to the intronic sequence located immediately downstream of the sequence comprising the 3′ end of the alternative exon (see FIG. 12). In some embodiments, the first 10 nucleotides of the intronic sequence located immediately downstream of the alternatively-spliced exon comprise 1-5 nucleotide substitutions, relative to the naturally occurring or wild-type intronic sequence located immediately downstream of naturally occurring or wild-type alternative exon. In some embodiments, the first 10 nucleotides of the intronic sequence located immediately downstream of the alternatively-spliced exon comprise 1 nucleotide substitution, relative to the naturally occurring or wild-type intronic sequence located immediately downstream of naturally occurring or wild-type alternative exon. In some embodiments, the first 10 nucleotides of the intronic sequence located immediately downstream of the alternatively-spliced exon comprise 2 nucleotide substitutions, relative to the naturally occurring or wild-type intronic sequence located immediately downstream of naturally occurring or wild-type alternative exon. In some embodiments, the first 10 nucleotides of the intronic sequence located immediately downstream of the alternatively-spliced exon comprise 3 nucleotide substitutions, relative to the naturally occurring or wild-type intronic sequence located immediately downstream of naturally occurring or wild-type alternative exon. In some embodiments, the first 10 nucleotides of the intronic sequence located immediately downstream of the alternatively-spliced exon comprise 4 nucleotide substitutions, relative to the naturally occurring or wild-type intronic sequence located immediately downstream of naturally occurring or wild-type alternative exon. In some embodiments, the first 10 nucleotides of the intronic sequence located immediately downstream of the alternatively-spliced exon comprise 5 nucleotide substitutions, relative to the naturally occurring or wild-type intronic sequence located immediately downstream of naturally occurring or wild-type alternative exon. In some embodiments, the 1-5 nucleotide substitutions restore or partially restore the strength of the 5′ splice site of the alternative exon, relative to the strength of the 5′ splice site of the naturally occurring or wild-type alternative exon.

[0309] Additionally or alternatively, in some embodiments the modification comprises disrupting or deleting all native start codons located 5′ to the heterologous start codon. In some embodiments, wherein the alternatively-spliced exon cassette comprises more than one alternatively-spliced exon, all native start codons located 5′ to the heterologous start codon of the 5′-most alternatively-spliced exon are disrupted or deleted. Additionally or alternatively, in some embodiments the modification comprises introducing into the alternatively-spliced exon a heterologous, in-frame stop codon at least 50 nucleotides upstream of the next 5′ splice junction. In some embodiments, the alternatively-spliced exon is a nonsense-mediated decay (NMD) exon. In some embodiments, the NMD exon comprises an in-frame stop codon that is at least 50 nucleotides upstream of the next 5′ splice junction.

[0310] In some embodiments, the alternatively-spliced exon is considered to be synthetic when it is situated non-naturally (e.g., is linked to a coding sequence to which it would not be linked in wild-type or naturally-occurring conditions), relative to the wild-type alternatively-spliced exon (e.g., is heterologous). In some embodiments, the alternatively-spliced exon is considered to be synthetic when it (i) undergoes one or more nucleic acid modifications, and (ii) is situated non-naturally, relative to the wild-type alternatively-spliced exon.

[0311] In some embodiments, the alternatively-spliced exon is a regulatory exon. In some embodiments, the regulatory exon is an alternatively regulated exon (e.g., an exon known to be subject to alternative splicing mechanisms). It will be appreciated that alternative splicing is a process by which exons or portions of exons or noncoding regions within a pre-mRNA transcript are differentially joined or skipped, resulting in multiple protein isoforms being encoded by a single gene. The regulation of alternative splicing is complex.

[0312] Briefly, alternative splicing is known to be regulated by the functional coupling between transcription and splicing. Additional molecular features, such as chromatin structure, RNA structure and alternative transcription initiation or alternative transcription termination, collaborate with these basic components to produce the multiple isoforms that result from alternative splicing (see, e.g., Wang, et al., Biomed Rep. 2015 March; 3(2): 152-158). In certain embodiments, the compositions and methods of the present disclosure utilize the naturally-occurring mechanisms which regulate alternative splicing to express coding regions of interest (e.g., what would be alternatively spliced isoforms in the natural context) in specific biological conditions. In other embodiments, additional genetic elements may be incorporated into the DNA. In some embodiments, such additional genetic elements may become incorporated into the corresponding pre-mRNA, and may consequently influence, control, or otherwise regulate the splicing of the pre-mRNA to form one or more mRNA isoforms.

[0313] In some aspects, an alternatively-spliced exon—for which splicing may be regulated—is an exon for which splicing levels differ by at least 5%, for example at least 10%, at least 15%, at least 20%, at least 25%, at least 30%, at least 35%, at least 40%, at least 45%, at least 50%, at least 55%, at least 60%, at least 65%, at least 70%, at least 75%, at least 80%, at least 85%, at least 90%, at least 95%, or 100% under two different conditions (e.g., in different tissues, in response to intracellular T cell levels, in response to intracellular levels of one or more RNA binding proteins, in the context of an autoregulated gene, etc). By “splicing levels differ by 5%”, it is meant that the splicing levels for an exon of interest are measured in two different conditions, and the splicing level is compared between the conditions and expressed as a percentage change. For example, if the splicing level in condition A is 80%, and the splicing level in condition B is 85%, the splicing levels between conditions A and B differ by 5%. Likewise, if the splicing level in condition A is 80%, and the splicing level in condition B is 75%, the splicing levels between conditions A and B also differ by 5%.

[0314] In some embodiments, the step of calculating a difference in expression of certain isoforms of certain genes in certain conditions as described herein is performed by calculating a percent spliced-in (psi) score. A psi (Ψ) score is a value between 0 to 1 (e.g., 0.01, 0.02, 0.03, 0.04, 0.05, 0.06, 0.07, 0.08, 0.09, 0.10, 0.11, 0.12, 0.13, 0.14, 0.15, 0.16, 0.17, 0.18, 0.19, 0.20, 0.21, 0.22, 0.23, 0.24, 0.25, 0.26, 0.27, 0.28, 0.29, 0.30, 0.31, 0.32, 0.33, 0.34, 0.35, 0.36, 0.37, 0.38, 0.39, 0.40, 0.41, 0.42, 0.43, 0.44, 0.45, 0.46, 0.47, 0.48, 0.49, 0.50, 0.51, 0.52, 0.53, 0.54, 0.55, 0.56, 0.57, 0.58, 0.59, 0.60, 0.61, 0.62, 0.63, 0.64, 0.65, 0.66, 0.67, 0.68, 0.69, 0.70, 0.71, 0.72, 0.73, 0.74, 0.75, 0.76, 0.77, 0.78, 0.79, 0.80, 0.81, 0.82, 0.83, 0.84, 0.85, 0.86, 0.87, 0.88, 0.89, 0.90, 0.91, 0.92, 0.93, 0.94, 0.95, 0.96, 0.97, 0.98, 0.99, or 1.0, or any value included therein such as e.g. 0.001, 0.0001, 0.0001, etc.) that quantifies alternative splicing occurrences present within a sample, or under certain conditions of interest.

[0315] In some embodiments, the Ψ score is calculated (e.g., calculated from RNAseq reads) by dividing the number of inclusion reads (e.g., the number of alternative splicing events for a gene of interest) by the total number of inclusion reads and exclusion reads (e.g., the number of normal (e.g., non-alternative) splicing events for the gene of interest). Therefore, in some embodiments the Ψ score is calculated according to the following formula for the gene of interest:

$$Ψ score = \frac{inclusion reads}{inclusion reads + exclusion reads}$$

[0316] In some embodiments, the calculating comprises performing a mixture of isoforms (MISO) analysis. MISO analysis provides an estimate of isoform expression levels within a sample (e.g., a sample comprising a tissue of interest) based on a statistical model and assesses confidence in those estimates. In some embodiments, MISO analysis is performed using MISO software (see, e.g., Katz, Y., E. T. Wang, et al. (2010), Analysis and design of RNA sequencing experiments for identifying isoform regulation, Nat Methods 7(12): 1009-1015).

[0317] In some embodiments, a Ψ score higher than (>) 0.50 (for example 0.51, 0.52, 0.53, 0.54, 0.55, 0.56, 0.57, 0.58, 0.59, 0.60, 0.61, 0.62, 0.63, 0.64, 0.65, 0.66, 0.67, 0.68, 0.69, 0.70, 0.71, 0.72, 0.73, 0.74, 0.75, 0.76, 0.77, 0.78, 0.79, 0.80, 0.81, 0.82, 0.83, 0.84, 0.85, 0.86, 0.87, 0.88, 0.89, 0.90, 0.91, 0.92, 0.93, 0.94, 0.95, 0.96, 0.97, 0.98, 0.99, or 1.0, or any value included therein such as e.g. 0.5001, 0.50001, etc.) indicates that a greater number of alternative splicing events for the gene of interest are present in the tested sample than the number of regular splicing events. Conversely, in some embodiments a Ψ score lower than (<) 0.50 (for example 0, 0.01, 0.02, 0.03, 0.04, 0.05, 0.06, 0.07, 0.08, 0.09, 0.10, 0.11, 0.12, 0.13, 0.14, 0.15, 0.16, 0.17, 0.18, 0.19, 0.2, 0.21, 0.22, 0.23, 0.24, 0.25, 0.26, 0.27, 0.28, 0.29, 0.30, 0.31, 0.32, 0.33, 0.34, 0.35, 0.36, 0.37, 0.38, 0.39, 0.40, 0.41, 0.42, 0.43, 0.44, 0.45, 0.46, 0.47, 0.48, 0.49, or any value included therein such as e.g. 0.499, 0.4999, etc.) indicates that a lower number of alternative splicing events for the gene of interest are present in the tested sample than the number of regular splicing events.

[0318] As used herein, delta psi (AN) score is used to refer to the calculation of the difference between two Ψ scores for a single gene of interest (e.g., in different tissues, in different intracellular conditions, etc.). The difference between the two calculated Ψ scores is the AN score. It will be understood that, because a Ψ score may be any value between 0 and 1, as described herein, a AN score (that is, the difference between the two calculated Ψ scores) may also be any value between 0 and 1 (e.g., 0, 0.01, 0.02, 0.03, 0.04, 0.05, 0.06, 0.07, 0.08, 0.09, 0.10, 0.11, 0.12, 0.13, 0.14, 0.15, 0.16, 0.17, 0.18, 0.19, 0.20, 0.21, 0.22, 0.23, 0.24, 0.25, 0.26, 0.27, 0.28, 0.29, 0.30, 0.31, 0.32, 0.33, 0.34, 0.35, 0.36, 0.37, 0.38, 0.39, 0.40, 0.41, 0.42, 0.43, 0.44, 0.45, 0.46, 0.47, 0.48, 0.49, 0.50, 0.51, 0.52, 0.53, 0.54, 0.55, 0.56, 0.57, 0.58, 0.59, 0.60, 0.61, 0.62, 0.63, 0.64, 0.65, 0.66, 0.67, 0.68, 0.69, 0.70, 0.71, 0.72, 0.73, 0.74, 0.75, 0.76, 0.77, 0.78, 0.79, 0.80, 0.81, 0.82, 0.83, 0.84, 0.85, 0.86, 0.87, 0.88, 0.89, 0.90, 0.91, 0.92, 0.93, 0.94, 0.95, 0.96, 0.97, 0.98, 0.99, or 1.0, or any value included therein such as e.g. 0.001, 0.0001, 0.0001, etc.) or any value between 0 and −1 (e.g., 0, −0.01, −0.02, −0.03, −0.04, −0.05, −0.06, −0.07, −0.08, −0.09, −0.10, −0.11, −0.12, −0.13, −0.14, −0.15, −0.16, −0.17, −0.18, −0.19, −0.20, −0.21, −0.22, −0.23, −0.24, −0.25, −0.26, −0.27, −0.28, −0.29, −0.30, −0.31, −0.32, −0.33, −0.34, −0.35, −0.36, −0.37, −0.38, −0.39, −0.40, −0.41, −0.42, −0.43, −0.44, −0.45, −0.46, −0.47, −0.48, −0.49, −0.50, −0.51, −0.52, −0.53, −0.54, −0.55, −0.56, −0.57, −0.58, −0.59, −0.60, −0.61, −0.62, −0.63, −0.64, −0.65, −0.66, −0.67, −0.68, −0.69, −0.70, −0.71, −0.72, −0.73, −0.74, −0.75, −0.76, −0.77, −0.78, −0.79, −0.80, −0.81, −0.82, −0.83, −0.84, −0.85, −0.86, −0.87, −0.88, −0.89, −0.90, −0.91, −0.92, −0.93, −0.94, −0.95, −0.96, −0.97, −0.98, −0.99, or −1.0, or any value included therein such as e.g. −0.001, −0.0001, −0.0001, etc.). In some embodiments, a AN score may be expressed as an absolute value where the absolute value of e.g. −0.1 is 0.1.

[0319] In some embodiments, the alternatively-spliced exon is a tissue-specific alternatively-spliced exon. In some embodiments, one or more tissue-specific alternatively-spliced exons are included in a recombinant nucleic acid (e.g., in a rAAV). Non-limiting examples of tissue-specific alternatively-spliced exons are described in Supplemental Table S5 from Wang, E. T., et al., (2008), Nature, 456, 470-76, incorporated herein by reference. Other tissue-specific exons can be identified from transcriptome data. Non-limiting examples of RNA sequence motifs that can exhibit tissue-specific activity, thereby controlling the inclusion or exclusion of tissue-specific exons, are described in Badr, E., et al., (2016), PLOS One, 11(11): e0166978, incorporated herein by reference. In some embodiments, alternative splicing of the tissue-specific exon results in the expression of the transgene (e.g., of the product encoded by the coding region of interest) in heart tissue, but not in skeletal tissue. In some embodiments, alternative splicing of the tissue-specific exon results in the expression of the transgene (e.g., of the product encoded by the coding region of interest) in skeletal tissue, but not in heart tissue. In some embodiments, a tissue-specific alternatively-spliced exon comprises an alternatively-spliced exon from any one or more of: CAMK2B, PKP2, LGMN, NRAP, VPS39, KSR1, PDLIM3, BIN1, ARFGAP2, KIF13A, and/or PICALM.

[0320] In some embodiments, the tissue-specific alternatively-spliced exon is or is derived from exon 11 of BIN1. In some embodiments, the tissue-specific alternatively-spliced exon which is or is derived from exon 11 of BIN1 comprises a polynucleotide having at least 70%, at least 75%, at least 80%, at least 90%, at least 92%, at least 95%, at least 98%, or at least 99% sequence identity, relative to a nucleic acid sequence as set forth in SEQ ID NO: 37. In some embodiments, the tissue-specific alternatively-spliced exon which is or is derived from exon 11 of BIN1 comprises a polynucleotide having a nucleic acid sequence as set forth in SEQ ID NO: 37. In some embodiments, the tissue-specific alternatively-spliced exon which is or is derived from exon 11 of BIN1 comprises a polynucleotide having at least 70%, at least 75%, at least 80%, at least 90%, at least 92%, at least 95%, at least 98%, or at least 99% sequence identity, relative to a nucleic acid sequence as set forth in SEQ ID NO: 38. In some embodiments, the tissue-specific alternatively-spliced exon which is or is derived from exon 11 of BIN1 comprises a polynucleotide having a nucleic acid sequence as set forth in SEQ ID NO: 38.

[0321] In some embodiments, an alternatively-spliced exon is an immunoresponsive alternatively-spliced exon (e.g., undergoes alternative splicing in the presence of an enhanced immune response, such as an increased T cell presence). In some embodiments, the immunoresponsive alternatively-spliced exon is alternatively spliced in states of cellular inflammation. In some embodiments, the immunoresponsive alternatively-spliced exon is alternatively spliced when an abnormally elevated quantity of T cells is present in the intracellular environment (e.g., more T cells are present than under homeostatic conditions). In some embodiments, an immunorepressive alternatively-spliced exon comprises an alternatively-spliced exon from any one of ABCC1, AK125149, ASCC2, BAT2D1, BBX, BRD8, BRE, C17orf70, CAMKK2, CBFB, CCAR1, CCDC7CD6, CHTF8, COL4A3BP, COL6A3, CUGBP1, CUGBP2, CXorf45, DENND3, DGUOK, DKFZp762G094, DNAJC7, DNASE1, EIF4A2, EIF4G2, EIF4H, EXOC7, EZH2, FAM120A, FAM136A, FAM36A, FARSB, FBXO38, FGFR1OP2, FIP1L1, FOXRED1, FUBP3, GALT, GATA3, GOLGA2, HIF1A, HMMR, HRB, IKZF1, ILF3, IRAK4, IRF1, KCTD13, LEF1, LUC7L, LYRM1, MALT1 e7, MAP2K7, MAP3K7, MAP4K2, MBNL2, MFF, NAE1, NCSTN, NR4A3, NRF1, NUP98, PARP6, PCM1, PLAUR, PLSCR3, PPIL5, PPP5C, PTPRC-E4, PTPRC-E6, PTS, RABL5, RAPH1, SEC16A, SFRS3, SFRS7, SLMAP, SNRNP70, STAT6, TBC1D1, TIMM8B, TIR8, TRA2A, TROVE2, UGCGL1, VAP-B, VAV1, ZNF384, and ZNF496.

[0322] In some embodiments, an alternatively-spliced exon is a cell type-specific alternatively-spliced exon (e.g., undergoes alternative splicing only when located in certain cell types). In some embodiments, a cell type-specific alternatively-spliced exon comprises an alternatively-spliced exon as described in Joglekar, et al. (2021), A spatially resolved brain region- and cell type-specific isoform atlas of the postnatal mouse brain, Nature Comm., 12(463), which is incorporated herein by reference with respect to its description of cell type-specific alternative exons.

[0323] In some embodiments, an alternatively-spliced exon is alternatively spliced in cells which exhibit high levels of expression of a particular protein. In some embodiments, an alternatively-spliced exon is alternatively spliced in cells which exhibit low levels of expression of a particular protein. High or low expression of a particular protein may in some embodiments be indicative of a disease state. For example, in some forms of frontotemporal dementia, MAPT exon 10 is aberrantly included, leading to increased levels of the 4R vs. 3R isoform. Increased 4R isoform is associated with neurodegeneration.

[0324] Accordingly, in some embodiments an alternatively-spliced exon is alternatively spliced in cells which exhibit disease (e.g., severe disease). In some embodiments, such disease comprises Dentatorubral-pallido-luysian atrophy (DRPLA), myotonic dystrophy type 1 (DM1), myotonic dystrophy type 2 (DM2), Fragile X syndrome of mental retardation (FMR1), Fragile X tremor ataxia syndrome (FXTAS), FRAXE mental retardation (FMR2), Friedreichs ataxia (FRDA), Huntington disease (HD), Huntington disease-like 2 (HDL2), Oculopharyngeal muscular dystrophy (OPMD), Myoclonic epilepsy type 1, Alzheimer's disease, ALS/FTD, spinocerebellar ataxia type 1 (SCA1), spinocerebellar ataxia type 2 (SCA2), spinocerebellar ataxia type 3 (SCA3), spinocerebellar ataxia type 6 (SCA6), spinocerebellar ataxia type 7 (SCAT), spinocerebellar ataxia type 8 (SCA8), spinocerebellar ataxia type 10 (SCA10), spinocerebellar ataxia type 12 (SCA12), spinocerebellar ataxia type 17 (SCA17), Syndromic/non-syndromic X-linked mental retardation, Emery-Dreifuss muscular dystrophy type 2, familial partial lipodystrophy, limb girdle muscular dystrophy type 1B, dilated cardiomyopathy, familial partial lipodystrophy, Charcot-Marie-Tooth disorder type 2B1, mandibuloacral dysplasia, childhood progeria syndrome (Hutchinson-Gilford syndrome), Werner syndrome, Dilated cardiomyopathy (DCM), Hypertrophic cardiomyopathy (HCM), Restrictive cardiomyopathy (RCM), Left Ventricular Non-compaction (LVNC), Arrhythmogenic Right Ventricular Dysplasia (ARVD), takotsubo cardiomyopathy, Duchenne muscular dystrophy, Becker muscular dystrophy, Limb-girdle muscular dystrophy, Facioscapulohumeral muscular dystrophy, Congenital muscular dystrophy, Oculopharyngeal muscular dystrophy, Distal muscular dystrophy, Emery-Dreifuss muscular dystrophy, dementia, Parkinson's disease (PD), a PD-related disorder, Prion disease, a motor neuron disease (MND), Progressive bulbar palsy (PBP), Progressive muscular atrophy (PMA), Primary lateral sclerosis (PLS), Spinal muscular atrophy (SMA), a bladder cancer, a breast cancer, a colorectal cancer, a kidney cancer, a lung cancer, a lymphoma, a melanoma, an oral cancer, an ovarian cancer, an oropharyngeal cancer, a pancreatic cancer, a prostate cancer, a thyroid cancer, a uterine cancer, Down syndrome, Prader-Willi Syndrome (PWS), Bloom Syndrome, Cockayne Syndrome Type I-216400, Cockayne Syndrome Type III, Cockayne Syndrome Type I, Hutchinson-Gilford Progeria Syndrome, Mandibuloacral Dysplasia with Type A Lipodystrophy, Progeria, Adult Onset Progeroid Syndrome, Neonatal Rothmund-Thomson Syndrome, Seip Syndrome, Werner Syndrome, Replication Focus-Forming Activity 1, myotubular myopathy, Danon Disease, and/or centronuclear myopathy.

[0325] In some embodiments, an alternatively-spliced exon comprises an exon which may be differentially spliced depending on the intracellular level of the protein encoded by the coding region associated with the alternatively-spliced exon.

[0326] In some embodiments, an alternatively-spliced exon comprises an alternatively-spliced exon comprising a polynucleotide sequence as set forth in any one of SEQ ID NOs: 23-44. In some embodiments, an alternatively-spliced exon comprises a polynucleotide sequence that is 90%, 91%, 92%, 93%, 94%, 95%, 96%, 97%, 98%, or 99% identical to any one of SEQ ID NOs: 23-44.

[0327] In some embodiments, the alternatively-spliced exon is retained in the spliced transcript. Retention of the alternatively-spliced exon in the spliced transcript occurs under the alternative splicing conditions specific to said alternatively-spliced exon as described herein. In some embodiments, wherein the alternatively-spliced exon cassette comprises more than one alternatively-spliced exon, the 5′-most alternatively-spliced exon is retained in the spliced transcript. In some embodiments, wherein the alternatively-spliced exon cassette comprises more than one alternatively-spliced exon, the 3′-most alternatively-spliced exon is included in the spliced transcript. In some embodiments, wherein the alternatively-spliced exon cassette comprises more than one alternatively-spliced exon, all alternatively-spliced exons are included in the spliced transcript.

[0328] In some embodiments, retention of the alternatively-spliced exon in the spliced transcript results in the productive expression of the transgene (e.g., productive translation of the protein). Expression of the product (e.g., therapeutic protein) encoded by the coding region of interest may in some embodiments be desirable. For example, in myotubular myopathy, expression of myotubularin 1 is depleted in skeletal muscle, and therefore restoration of myotubularin 1 in skeletal muscle is desirable. However, in some embodiments, expression of the product (e.g., therapeutic protein) encoded by the coding region of interest may be undesirable. For example, in myotubular myopathy, expression of myotubularin 1 in the heart may be undesirable. Accordingly, in some embodiments retention of the alternatively-spliced exon in the spliced transcript does not result in the productive expression of the transgene (e.g., no productive translation of the protein).

[0329] In some embodiments, the alternatively-spliced exon is located 5′ to the coding region of the transgene. In some embodiments, the alternatively-spliced exon is located 3′ to the coding region of the transgene. In some embodiments, the alternatively-spliced exon is located within the coding region of the transgene. In some embodiments, the alternatively-spliced exon is not located within the coding region of the transgene. In some embodiments, the alternatively-spliced exon is located 3′ to a constitutive exon. In some embodiments, the alternatively-spliced exon is located 5′ to a constitutive exon.

### (ii) Constitutive Exons

[0330] In some embodiments, the recombinant viral genomes of the present disclosure comprise one or more constitutive exons. In various embodiments, the alternatively-spliced exon and the one or more constitutive exons may be configured as a cassette (e.g., comprised within a transgene. In some embodiments, the transgene comprising an alternatively-spliced exon cassette comprises 1, 2, 3, 4, 5, 6, 7, 8, 9, 10, 11, 12, 13, 14, 15, 16, 17, 18, 19, or 20 constitutive exons. In various embodiments, one or more constitutive exons may comprise a coding region of interest, or a portion thereof. In some embodiments, the constitutive exon is considered to be constitutive when it is present in all isoforms of spliced mRNAs resulting from the splicing of a pre-mRNA transcript.

[0331] A constitutive exon may in some embodiments be synthetic, but it need not be. A constitutive exon may be considered synthetic because it undergoes one or more nucleic acid modifications, relative to the wild-type constitutive exon. A nucleic acid modification may be a substitution or deletion of one or more nucleotides that form the nucleic acid sequence of the constitutive exon. In some embodiments, the modification comprises disrupting or deleting all native start codons located within the constitutive exon.

[0332] In some embodiments, the constitutive exon is considered to be synthetic when it is situated non-naturally (e.g., is linked to a coding sequence to which it would not be linked in wild-type or naturally-occurring conditions), relative to the wild-type constitutive exon (e.g., is heterologous). In some embodiments, the constitutive exon is considered to be synthetic when it (i) undergoes one or more nucleic acid modifications, and (ii) is situated non-naturally, relative to the wild-type constitutive exon.

[0333] In some embodiments, the constitutive exon is naturally occurring (e.g., does not comprise any nucleic acid modifications, relative to the wild-type constitutive exon). In some embodiments, the constitutive exon is a native exon associated with the coding region of the transgene. In some embodiments, the constitutive exon is from or is derived from the same gene as the alternatively-spliced exon.

[0334] In some embodiments, the constitutive exon is from or is derived from a constitutive exon of a gene selected from the group consisting of: MBNL1, MBNL2, MBNL3, hnRNP A1, hnRNP A2B1, hnRNP C, hnRNP D, hnRNP DL, hnRNP F, hnRNP H, hnRNP K, hnRNP L, hnRNP M, hnRNP R, hnRNP U, FUS, TDP43, PABPN1, ATXN2, TAF15, EWSR1, MATR3, TIA1, FMRP, MTM1, MTMR2, LAMP2, KIF5A, a microdystrophin-encoding gene, C9ORF72, HTT, DNM2, BIN1, RYR1, NEB, ACTA, TPM3, TPM2, TNNT2, CFL2, KBTBD13, KLHL40, KLHL41, LMOD3, MYPN, SEPN1, TTN, SPEG, MYH7, TK2, POLG1, GAA, AGL, PYGM, SLC22A5, OCTN2, ETF, ETFH, PNPLA2, a cytochrome b oxidase-encoding gene, a cytochrome c oxidase-encoding gene, CLCN1, SCN4A, DMPK, CNBP, MYOT, LMNA, CAV3, DNAJB6, DES, TNPO3, HNRPDL, CAPN3, DYSF, an alpha-sarcoglycan-encoding gene, a beta-sarcoglycan-encoding gene, a gamma-sarcoglycan-encoding gene, a delta-sarcoglycan-encoding gene, TCAP, TRIM32, FKRP, FXN, POMT1, FKTN, POMT2, POMGnT1, DAG1, ANO5, PLEC1, TRAPPC11, GMPPB, ISPD, LIMS2, POPDC1, TOR1AIP1, POGLUT2, LAMA2, COL6A1, POMT1, POMT2, DUX4, EMD, PAX7, PMP22, MPZ, MFN2, SMCHD1, SMN, Lamin A/C (LAMN), and/or GJB1.

[0335] In some embodiments, the constitutive exon is from or is derived from a constitutive exon of a gene(s) selected from the group consisting of: ABCC1, AK125149, ASCC2, BAT2D1, BBX, BRD8, BRE, C17orf70, CAMKK2, CBFB, CCAR1, CCDC7CD6, CHTF8, COL4A3BP, COL6A3, CUGBP1, CUGBP2, CXorf45, DENND3, DGUOK, DKFZp762G094, DNAJC7, DNASE1, EIF4A2, EIF4G2, EIF4H, EXOC7, EZH2, FAM120A, FAM136A, FAM36A, FARSB, FBXO38, FGFR1OP2, FIP1L1, FOXRED1, FUBP3, GALT, GATA3, GOLGA2, HIF1A, HMMR, HRB, IKZF1, ILF3, IRAK4, IRF1, KCTD13, LEF1, LUC7L, LYRM1, MALT1 e7, MAP2K7, MAP3K7, MAP4K2, MBNL2, MFF, NAE1, NCSTN, NR4A3, NRF1, NUP98, PARP6, PCM1, PLAUR, PLSCR3, PPIL5, PPP5C, PTPRC-E4, PTPRC-E6, PTS, RABL5, RAPH1, SEC16A, SFRS3, SFRS7, SLMAP, SNRNP70, STAT6, TBC1D1, TIMM8B, TIR8, TRA2A, TROVE2, UGCGL1, VAP-B, VAV1, ZNF384, and/or ZNF496.

[0336] In some embodiments, the constitutive exon is from or is derived from a constitutive exon of a gene(s) selected from the group consisting of: CAMK2B, PKP2, LGMN, NRAP, VPS39, KSR1, PDLIM3, BIN1, ARFGAP2, KIF13A, and/or PICALM. In some embodiments, the constitutive exon is from or is derived from a constitutive exon of SMN1. In some embodiments, the constitutive exon is from or is derived from exon 6 of SMN1. In some embodiments, the constitutive exon which is derived from SMN1 exon 6 is a fragment of (e.g., is truncated relative to) the wild-type or naturally occurring sequence of SMN1 exon 6. In some embodiments, the constitutive exon which is derived from SMN1 exon 6 comprises a polynucleotide having a nucleic acid sequence as set forth in SEQ ID NO: 102. In some embodiments, the constitutive exon which is derived from SMN1 exon 6 comprises a polynucleotide having at least 70%, at least 75%, at least 80%, at least 90%, at least 92%, at least 95%, at least 98%, or at least 99% sequence identity, relative to a nucleic acid sequence as set forth in SEQ ID NO: 102.

[0337] In some embodiments, the constitutive exon is not a native exon associated with the coding region of the transgene. In some embodiments, the constitutive exon is not from nor is derived from the same gene as the alternatively-spliced exon.

[0338] In some embodiments, a constitutive exon is located 5′ to the alternatively-spliced exon. Additionally or alternatively, in some embodiments a constitutive exon is located 3′ to the alternatively-spliced exon. In some embodiments, a constitutive exon is located 5′ to the coding region of the transgene. Additionally or alternatively, in some embodiments a constitutive exon is located 3′ to coding region of the transgene.

[0339] In some embodiments, the constitutive exon is retained in the spliced transcript (e.g., spliced in). In some embodiments, wherein the transgene comprising an alternatively-spliced exon cassette comprises more than one constitutive exon, the 5′-most constitutive exon is retained in the spliced transcript. In some embodiments, wherein the transgene comprising an alternatively-spliced exon cassette comprises more than one constitutive exon, the 3′-most constitutive exon is retained in the spliced transcript. In some embodiments, wherein the transgene comprising an alternatively-spliced exon cassette comprises more than one constitutive exon, all constitutive exons are retained in the spliced transcript. In some embodiments, the constitutive exon is excluded from the spliced transcript (e.g., spliced out).

(iii) Introns

[0340] In other embodiments, the recombinant viral genomes of the present disclosure comprise one or more introns. In various embodiments, the alternatively-spliced exon and the one or more introns (or portions thereof) may be configured as a cassette. In some embodiments, a nucleic acid (e.g., a nucleic acid comprising a recombinant viral genome) comprises an alternatively-spliced exon cassette encoding at least one transgene that contains at least one recombinant (e.g., engineered, truncated) intron that supports sufficient splice regulation of the transgene to be therapeutically effective. In some embodiments an alternatively-spliced exon cassette is an RNA molecule (e.g., a pre-mRNA) that contains one or more (e.g., two or more) recombinant (e.g., engineered; e.g., truncated) introns flanking one or more exons. In some embodiments, an alternatively-spliced exon cassette is a DNA molecule that encodes the RNA molecule containing one or more recombinant (e.g., engineered; e.g., truncated) introns. In some embodiments, a transgene comprising an alternatively-spliced exon cassette contains other regulatory sequences (e.g., promoters, 5′ or 3 UTRs, or other regulatory sequences) in addition to the gene coding (e.g., protein coding) sequences and the at least one recombinant (e.g., engineered; e.g., truncated) intron for which splicing can be regulated, as described elsewhere herein.

[0341] Accordingly, in some embodiments, a recombinant viral genome of the present disclosure comprises a transgene comprising an alternatively-spliced exon cassette, wherein the alternatively-spliced exon cassette comprises among other components at least one intron (or portion thereof). In some embodiments, the intron is a flanking intron (or portion thereof). In some embodiments, the alternatively-spliced exon cassette comprises 1, 2, 3, 4, 5, 6, 7, or 8 flanking introns (or portion(s) thereof).

[0342] In some embodiments, an exon (e.g., an alternatively-spliced exon, or a constitutive exon) is flanked by one or more introns (e.g., flanking introns), or portion(s) thereof. In some embodiments, an alternatively-spliced exon is flanked by one or more introns (or portion(s) thereof). In some embodiments, an alternatively-spliced exon is flanked by one intron (or portion thereof). In some embodiments, wherein the alternatively-spliced exon is flanked by one intron, the flanking intron (or portion thereof) is located 3′ to the alternatively-spliced exon. In some embodiments, wherein the alternatively-spliced exon is flanked by one intron, the flanking intron (or portion thereof) is located 5′ to the alternatively-spliced exon. In some embodiments, an alternatively-spliced exon is flanked by two introns (or portions thereof). In some embodiments, wherein the alternatively-spliced exon cassette comprises more than one alternatively-spliced exon, each alternatively-spliced exon is flanked by at least one, and in some embodiments two, flanking intron(s) (or portion(s) thereof). In some embodiments, an intron is a native flanking intron or native flanking intronic sequence of the alternatively-spliced exon. In some embodiments, an intron is not a native flanking intron or native flanking intronic sequence of the alternatively-spliced exon.

[0343] In some embodiments, a constitutive exon is flanked by one or more introns (or portion(s) thereof). In some embodiments, a constitutive exon is flanked by one intron (or portion thereof). In some embodiments, wherein the constitutive exon is flanked by one intron, the flanking intron (or portion thereof) is located 3′ to the constitutive exon. In some embodiments, wherein the constitutive exon is flanked by one intron, the flanking intron (or portion thereof) is located 5′ to the constitutive exon. In some embodiments, a constitutive exon is flanked by two introns (or portions thereof). In some embodiments, wherein the alternatively-spliced exon cassette comprises more than one constitutive exon, each constitutive exon is flanked by at least one, and in some embodiments two, flanking intron(s) (or portion(s) thereof). In some embodiments, an intron is a native flanking intron or native flanking intronic sequence of the constitutive exon. In some embodiments, an intron is not a native flanking intron or native flanking intronic sequence of the constitutive exon.

[0344] In some embodiments, an intron is a natural intron, and comprises no modifications, relative to a native intron.

[0345] An intron or intronic sequence may in some embodiments be synthetic, but it need not be. A synthetic intron or intronic sequence may be considered synthetic because it undergoes one or more nucleic acid modifications, relative to the wild-type or native intron. A nucleic acid modification may be a substitution or deletion of one or more nucleotides that form the nucleic acid sequence of the intron or intronic sequence.

[0346] In some embodiments, an intron or intronic sequence is considered to be synthetic when it is situated non-naturally (e.g., is linked to an exon to which it would not be linked in wild-type or naturally-occurring conditions), relative to the wild-type intron or intronic sequence (e.g., is heterologous). In some embodiments, the intron or intronic sequence is considered to be synthetic when it (i) undergoes one or more nucleic acid modifications, and (ii) is situated non-naturally, relative to the wild-type intron or intronic sequence.

[0347] In some embodiments, an intron (e.g., a flanking intron) (or portion thereof) comprising one or more nucleic acid modifications, relative to the wild-type intron, is an engineered intron or intronic sequence. In some embodiments, the engineered intron or intronic sequence comprises a splice donor and splice acceptor site, and a functional branch point to which the splice donor site can be joined in the first trans-esterification reaction of splicing.

[0348] In some embodiments, an intron (e.g., a flanking intron) or intronic sequence comprising one or more nucleic acid modifications, relative to the wild-type intron, comprises a truncated version of a natural intron. By “truncated version of a natural intron”, it is meant that the naturally-occurring, full-length intron is shortened (e.g., truncated) via the removal of nucleotides. In some embodiments, an engineered (e.g., recombinant) intron or intronic sequence is a truncated version of a natural intron. However, in some embodiments an engineered intron or intronic sequence can be designed to include functional splice donor and acceptor sites and a functional branch point in addition to one or more regulatory regions that are derived from different introns, or that are non-naturally occurring sequences (e.g., sequence variants of naturally-occurring sequences, consensus sequences, or de novo designed sequences). Accordingly, in some embodiments an engineered intron or intronic sequence is not a truncated version of a naturally occurring intron, but contains one or more sequences from a naturally occurring intron.

[0349] In some embodiments, an intron (e.g., a flanking intron) (or portion thereof) comprising one or more nucleic acid modifications, relative to the wild-type intron, is truncated at its 5′ end. In some embodiments, 1-10,000 nucleotides are truncated from the 5′ end (e.g., 1-50, 50-100, 100-500, 500-1,000, 1,000-5,000, 5,000-10,000, 10,000-20,000, 20,000-50,000, or 50,000-100,000 nucleotides are truncated from the 5′ end). In some embodiments, the 5′ splice site is not retained in the truncated intron (or portion thereof). In some embodiments, the 5′ splice site is retained in the truncated intron (or portion thereof). In some embodiments, a different 5′ splice site is included in the truncated intron (or portion thereof).

[0350] In some embodiments, an intron (e.g., a flanking intron) (or portion thereof) comprising one or more nucleic acid modifications, relative to the wild-type intron, is truncated at its 3′ end. In some embodiments, 1-10,000 nucleotides are truncated from the 3′ end (e.g., 1-50, 50-100, 100-500, 500-1,000, 1,000-5,000, 5,000-10,000, 10,000-20,000, 20,000-50,000, or 50,000-100,000 nucleotides are truncated from the 3′ end). In some embodiments, the 3′ splice site is not retained in the truncated intron (or portion thereof). In some embodiments, the 3′ splice site is retained in the truncated intron (or portion thereof). In some embodiments, a different 3′ splice site is included in the truncated intron (or portion thereof).

[0351] In some embodiments, an intron (e.g., a flanking intron) (or portion thereof) comprising one or more nucleic acid modifications, relative to the wild-type intron, is truncated at one or more internal locations. In some embodiments, 1-10,000 internal nucleotides are removed (e.g., 1-50, 50-100, 100-500, 500-1,000, 1,000-5,000, 5,000-10,000, 10,000-20,000, 20,000-50,000, or 50,000-100,000 internal nucleotides are removed). In some embodiments, the splice regulatory region is not retained in the truncated intron (or portion thereof). In some embodiments, the splice regulatory region is retained in the truncated intron (or portion thereof). In some embodiments, a different splice regulatory region is included in the truncated intron (or portion thereof).

[0352] In some embodiments, an intron (e.g., a flanking intron) (or portion thereof) comprising one or more nucleic acid modifications, relative to the wild-type intron, comprises one or more 5′, 3′, and/or internal deletions. It should be understood that the extent of truncation may depend on the size of the intron (or portion thereof) and the size of the gene. A truncation may require removal of sufficient intronic sequence to result in a recombinant gene construct that is small enough to be packaged in a recombinant virus of interest (e.g., in a recombinant AAV or lentivirus).

[0353] However, an intron typically includes one or more sequences required for efficient splicing and/or regulated splicing. In some embodiments, an intron or intronic sequence comprises one or more splice junction sites (e.g., a 5′ splice donor site, and/or a 3′ splice acceptor site). In some embodiments, an intron or intronic sequence retains a splice donor site (e.g., towards the 5′ end of the intron or intronic sequence), a branch site (e.g., towards the 3′ end of the intron or intronic sequence), a splice acceptor site (e.g., at the 3′ end of the intron or intronic sequence), and a splice regulatory sequence. In some embodiments, the intron or intronic sequence comprises a 5′ splice donor site. In some embodiments, the 5′ splice donor site is a GU or an AU. In some embodiments, the intron or intronic sequence comprises a 3′ splice acceptor site. In some embodiments, the 3′ splice acceptor site is an AG or an AC. In some embodiments, an intron or intronic sequence comprises at its 5′ end a 5′ splice donor site and at its 3′ end a 3′ splice acceptor site. In some embodiments, a regulatory sequence comprises a response element within an AG exclusion zone of the intron. In some embodiments, the intron or intronic sequence retains sequence motifs bound by the encoded protein (e.g., YGCY motifs for MBNL1, or GCAUG for RBFOX, or YCAY for NOVA, etc.). In some embodiments, an intron or intronic sequence is spliced out, and is not included in the spliced transcript.

[0354] In some embodiments, an intron or intronic sequence may include one or more human, non-human primate, and/or other mammalian or non-mammalian intron splice-regulatory sequences. In some embodiments, the regulatory sequences may have 80%-100% (e.g., 80-85%, 85%-90%, greater than 90%, 90%-95%, or 95%-100%) sequence identity, relative to a wild-type regulatory sequence.

[0355] In some embodiments, an intron or intronic sequence is approximately 50 to 4000 nucleotides long. In some embodiments, an intron or intronic sequence is approximately 50 to 100, 75-125, 100-150, 125-175, 200-250, 225-275, 300-350, 325-375, 400-450, 425-475, 500-550, 525-575, 600-650, 625-675, 700-750, 725-775, 800-850, 825-875, 900-950, 925-975, 950-1000, 1025-1075, 1050 to 1100, 1075-1125, 1100-1150, 1125-1175, 1200-1250, 1225-1275, 1300-1350, 1325-1375, 1400-1450, 1425-1475, 1500-1550, 1525-1575, 1600-1650, 1625-1675, 1700-1750, 1725-1775, 1800-1850, 1825-1875, 1900-1950, 1925-1975, 1950-2000, 2025-2075, 2050 to 2100, 2075-2125, 2100-2150, 2125-2175, 2200-2250, 2225-2275, 2300-2350, 2325-2375, 2400-2450, 2425-2475, 2500-2550, 2525-2575, 2600-2650, 2625-2675, 2700-2750, 2725-2775, 2800-2850, 2825-2875, 2900-2950, 2925-2975, 2950-3000, 3025-3075, 3050 to 3100, 3075-3125, 3100-3150, 3125-3175, 3200-3250, 3225-3275, 3300-3350, 3325-3375, 3400-3450, 3425-3475, 3500-3550, 3525-3575, 3600-3650, 3625-3675, 3700-3750, 3725-3775, 3800-3850, 3825-3875, 3900-3950, 3925-3975, or 3950-4000 nucleotides long, or any integer contained therein (e.g., 51, 52, 53, 54, 55, etc.). In some embodiments, an intron or intronic sequence is approximately 50-60, 55-65, 60-70, 65-75, 70-80, 75-85, 80-90, 95-105, 100-110, 105-115, 110-120, 115-125, 120-130, 125-135, 130-140, 135-145, 140-150, 145-155, 150-160, 155-165, 160-170, 165-175, 170-180, 175-185, 180-190, 185-195, or 190-200 nucleotides long, or any integer contained therein (e.g., 100, 101, 102, 103, 104, 105, etc.). In some embodiments, an intron or intronic sequence is approximately 50-80, 60-90, 70-100, 80-110, 90-120, 100-130, 110-140, 120-150, 130-160, 140-170, 150-180, 160-190, or 170-200 nucleotides long, or any integer contained therein (e.g., 120, 121, 122, 123, 124, 125, etc.).

[0356] In some embodiments, a natural or wild-type intron is truncated or otherwise modified so as to retain only the sequence which regulates the up- or down-stream alternative exon. In some embodiments, said regulatory sequence is located within approximately 100-300 nucleotides upstream or downstream of the exon-intron (or intron-exon) border. In some embodiments, said regulatory sequence is located within approximately 100-110, 105-115, 110-120, 115-125, 120-130, 125-135, 130-140, 135-145, 140-150, 145-155, 150-160, 155-165, 160-170, 165-175, 170-180, 175-185, 180-190, 185-195, 190-200, 205-215, 210-220, 215-225, 220-230, 225-235, 230-240, 235-245, 240-250, 245-255, 250-260, 255-265, 260-270, 265-275, 270-280, 275-285, 280-290, 285-295, or 290-300 nucleotides upstream or downstream of the exon-intron (or intron-exon) border. In some embodiments, said regulatory sequence is located within approximately 100-130, 110-140, 120-150, 130-160, 140-170, 150-180, 160-190, 170-200, 210-240, 220-250, 230-260, 240-270, 250-280, 260-290, or 270-300 nucleotides upstream or downstream of the exon-intron (or intron-exon) border.

[0357] In some embodiments, the only intron that is comprised within an alternatively-spliced exon cassette is a truncated regulated intron. A regulated intron may in some embodiments be a regulated intron that flanks the alternative exon in its natural or wild-type context. In some embodiments, two regulated introns flank the alternative exon in its natural or wild-type context. A regulated intron may be located 5′ or 3′ relative to the alternative exon in its natural or wild-type context. In some embodiments, a regulated intron or truncated regulated intron is 5′ relative to the alternative exon within an alternative exon cassette of the disclosure. In some embodiments, a regulated intron or truncated regulated intron is 3′ relative to the alternative exon within an alternative exon cassette of the disclosure. In some embodiments, two or more regulated introns are retained and truncated in an alternatively-spliced exon cassette. In some embodiments, the two or more truncated regulated introns flank the alternative exon within the alternative exon cassette. In some embodiments, all other (e.g., non-regulatory) introns and intronic sequences have been removed. However, in some embodiments, one or more of the other introns (e.g., the introns that are not subject to regulated splicing) or intronic sequences may be retained (and optionally truncated) depending on the size of the nucleic acid and the size limitations of the virus, respectively. In some embodiments, the only introns or intronic sequences in an alternatively-spliced exon cassette are truncated introns or intronic sequences (e.g., only one, 2, 3, 4, 5, 6, 7, 8, 9, 10 truncated introns or intronic sequences). In some embodiments, an alternatively-spliced exon cassette does not contain any full-length introns. In some embodiments, an alternatively-spliced exon cassette does not contain any truncated introns or intronic sequences that are not regulated.

[0358] In some embodiments, the intron(s) or intronic sequence(s) flanking an alternative exon(s) comprise an intron or intronic sequence from or derived from a gene selected from the group consisting of: ABCC1, AK125149, ASCC2, BAT2D1, BBX, BRD8, BRE, C17orf70, CAMKK2, CBFB, CCAR1, CCDC7CD6, CHTF8, COL4A3BP, COL6A3, CUGBP1, CUGBP2, CXorf45, DENND3, DGUOK, DKFZp762G094, DNAJC7, DNASE1, EIF4A2, EIF4G2, EIF4H, EXOC7, EZH2, FAM120A, FAM136A, FAM36A, FARSB, FBXO38, FGFR1OP2, FIP1L1, FOXRED1, FUBP3, GALT, GATA3, GOLGA2, HIF1A, HMMR, HRB, IKZF1, ILF3, IRAK4, IRF1, KCTD13, LEF1, LUC7L, LYRM1, MALT1 e7, MAP2K7, MAP3K7, MAP4K2, MBNL2, MFF, NAE1, NCSTN, NR4A3, NRF1, NUP98, PARP6, PCM1, PLAUR, PLSCR3, PPIL5, PPP5C, PTPRC-E4, PTPRC-E6, PTS, RABL5, RAPH1, SEC16A, SFRS3, SFRS7, SLMAP, SNRNP70, STAT6, TBC1D1, TIMM8B, TIR8, TRA2A, TROVE2, UGCGL1, VAP-B, VAV1, ZNF384, and/or ZNF496.

[0359] In some embodiments, the intron(s) or intronic sequence(s) flanking an alternative exon(s) comprise an intron or intronic sequence from or derived from a gene selected from the group consisting of: CAMK2B, PKP2, LGMN, NRAP, VPS39, KSR1, PDLIM3, BIN1, ARFGAP2, KIF13A, and/or PICALM.

[0360] In some embodiments, the intron(s) or intronic sequence(s) flanking an alternative exon(s) is or is derived from an intron of BIN1. In some embodiments, the intron(s) or intronic sequence(s) flanking an alternative exon(s) is or is derived from intron 10 and/or intron 11 of BIN1. In some embodiments, intron(s) or intronic sequence(s) flanking an alternative exon(s) which is or is derived from intron 10 of BIN1 comprises a polynucleotide having at least 70%, at least 75%, at least 80%, at least 90%, at least 92%, at least 95%, at least 98%, or at least 99% sequence identity, relative to a nucleic acid sequence as set forth in SEQ ID NO: 15. In some embodiments, the intron(s) or intronic sequence(s) flanking an alternative exon(s) which is or is derived from intron 10 of BIN1 comprises a polynucleotide having a nucleic acid sequence as set forth in SEQ ID NO: 15. In some embodiments, the intron(s) or intronic sequence(s) flanking an alternative exon(s) which is or is derived from intron 11 of BIN1 comprises a polynucleotide having at least 70%, at least 75%, at least 80%, at least 90%, at least 92%, at least 95%, at least 98%, or at least 99% sequence identity, relative to a nucleic acid sequence as set forth in SEQ ID NO: 16. In some embodiments, the intron(s) or intronic sequence(s) flanking an alternative exon(s) which is or is derived from intron 11 of BIN1 comprises a polynucleotide having a nucleic acid sequence as set forth in SEQ ID NO: 16.

[0361] In some embodiments, the intron(s) or intronic sequence(s) flanking an alternative exon(s) comprise an intron or intronic sequence comprising a polynucleotide sequence as set forth in any one of SEQ ID NOs: 1-22, 103, and 104. In some embodiments, an intron or intronic sequence comprises a polynucleotide sequence that is 90%, 91%, 92%, 93%, 94%, 95%, 96%, 97%, 98%, or 99% identical to any one of SEQ ID NOs: 1-22, 103, and 104.

[0362] In some embodiments, all the introns (or portion(s) thereof) and exons (or portion thereof) of an alternatively-spliced exon cassette are from the same gene. Some embodiments of the present invention contemplate heterologous gene constructs, wherein introns (or portion(s) thereof) and exons (or portion(s) thereof) from different genes are integrated into a single alternatively-spliced exon cassette or transgene. In some embodiments, at least one intron (or portion thereof) and at least one exon (or portion thereof) of the nucleic acid construct are from different genes.

[0363] In some embodiments, an intron (or portion thereof) and/or an exon (or portion thereof) is from or derived from a gene(s) which comprises any one or more of: MBNL1, MBNL2, MBNL3, hnRNP A1, hnRNP A2B1, hnRNP C, hnRNP D, hnRNP DL, hnRNP F, hnRNP H, hnRNP K, hnRNP L, hnRNP M, hnRNP R, hnRNP U, FUS, TDP43, PABPN1, ATXN2, TAF15, EWSR1, MATR3, TIA1, FMRP, MTM1, MTMR2, LAMP2, KIF5A, a microdystrophin-encoding gene, C9ORF72, HTT, DNM2, BIN1, RYR1, NEB, ACTA, TPM3, TPM2, TNNT2, CFL2, KBTBD13, KLHL40, KLHL41, LMOD3, MYPN, SEPN1, TTN, SPEG, MYH7, TK2, POLG1, GAA, AGL, PYGM, SLC22A5, OCTN2, ETF, ETFH, PNPLA2, a cytochrome b oxidase-encoding gene, a cytochrome c oxidase-encoding gene, CLCN1, SCN4A, DMPK, CNBP, MYOT, LMNA, CAV3, DNAJB6, DES, TNPO3, HNRPDL, CAPN3, DYSF, an alpha-sarcoglycan-encoding gene, a beta-sarcoglycan-encoding gene, a gamma-sarcoglycan-encoding gene, a delta-sarcoglycan-encoding gene, TCAP, TRIM32, FKRP, FXN, POMT1, FKTN, POMT2, POMGnT1, DAG1, ANO5, PLEC1, TRAPPC11, GMPPB, ISPD, LIMS2, POPDC1, TOR1AIP1, POGLUT2, LAMA2, COL6A1, POMT1, POMT2, DUX4, EMD, PAX7, PMP22, MPZ, MFN2, SMCHD1, SMN1, and/or GJB1.

[0364] In some embodiments, an intron (or portion thereof) and/or an exon (or portion thereof) is from or derived from a gene(s) which comprises any one or more of: ABCC1, AK125149, ASCC2, BAT2D1, BBX, BRD8, BRE, C17orf70, CAMKK2, CBFB, CCAR1, CCDC7CD6, CHTF8, COL4A3BP, COL6A3, CUGBP1, CUGBP2, CXorf45, DENND3, DGUOK, DKFZp762G094, DNAJC7, DNASE1, EIF4A2, EIF4G2, EIF4H, EXOC7, EZH2, FAM120A, FAM136A, FAM36A, FARSB, FBXO38, FGFR1OP2, FIP1L1, FOXRED1, FUBP3, GALT, GATA3, GOLGA2, HIF1A, HMMR, HRB, IKZF1, ILF3, IRAK4, IRF1, KCTD13, LEF1, LUC7L, LYRM1, MALT1 e7, MAP2K7, MAP3K7, MAP4K2, MBNL2, MFF, NAE1, NCSTN, NR4A3, NRF1, NUP98, PARP6, PCM1, PLAUR, PLSCR3, PPIL5, PPP5C, PTPRC-E4, PTPRC-E6, PTS, RABL5, RAPH1, SEC16A, SFRS3, SFRS7, SLMAP, SNRNP70, STAT6, TBC1D1, TIMM8B, TIR8, TRA2A, TROVE2, UGCGL1, VAP-B, VAV1, ZNF384, and/or ZNF496.

[0365] In some embodiments, an intron (or portion thereof) and/or an exon (or portion thereof) is from or derived from a gene(s) which comprises any one or more of: CAMK2B, PKP2, LGMN, NRAP, VPS39, KSR1, PDLIM3, BIN1, ARFGAP2, KIF13A, and/or PICALM.

[0366] In some embodiments, one or more introns (or portions thereof) and/or an exon (or portion thereof) is from or derived from BIN1.

[0367] In some embodiments, the one or more introns (or portions thereof) is or is derived from an intron(s) of BIN1. In some embodiments, the one or more introns (or portions thereof) is or is derived from intron 10 and/or intron 11 of BIN1. In some embodiments, the one or more introns (or portions thereof) which is or is derived from intron 10 of BIN1 comprises a polynucleotide having at least 70%, at least 75%, at least 80%, at least 90%, at least 92%, at least 95%, at least 98%, or at least 99% sequence identity, relative to a nucleic acid sequence as set forth in SEQ ID NO: 15. In some embodiments, the one or more introns (or portions thereof) which is or is derived from intron 10 of BIN1 comprises a polynucleotide having a nucleic acid sequence as set forth in SEQ ID NO: 15. In some embodiments, the one or more introns (or portions thereof) which is or is derived from intron 11 of BIN1 comprises a polynucleotide having at least 70%, at least 75%, at least 80%, at least 90%, at least 92%, at least 95%, at least 98%, or at least 99% sequence identity, relative to a nucleic acid sequence as set forth in SEQ ID NO: 16. In some embodiments, the one or more introns (or portions thereof) which is or is derived from intron 11 of BIN1 comprises a polynucleotide having a nucleic acid sequence as set forth in SEQ ID NO: 16.

[0368] In some embodiments, an exon (or portion thereof) is or is derived from exon 11 of BIN1. In some embodiments, the exon (or portion thereof) which is or is derived from exon 11 of BIN1 comprises a polynucleotide having at least 70%, at least 75%, at least 80%, at least 90%, at least 92%, at least 95%, at least 98%, or at least 99% sequence identity, relative to a nucleic acid sequence as set forth in SEQ ID NO: 37. In some embodiments, the exon (or portion thereof) which is or is derived from exon 11 of BIN1 comprises a polynucleotide having a nucleic acid sequence as set forth in SEQ ID NO: 37. In some embodiments, the exon (or portion thereof) which is or is derived from exon 11 of BIN1 comprises a polynucleotide having at least 70%, at least 75%, at least 80%, at least 90%, at least 92%, at least 95%, at least 98%, or at least 99% sequence identity, relative to a nucleic acid sequence as set forth in SEQ ID NO: 38. In some embodiments, the exon (or portion thereof) which is or is derived from exon 11 of BIN1 comprises a polynucleotide having a nucleic acid sequence as set forth in SEQ ID NO: 38.

[0369] In some embodiments, the one or more introns (or portions thereof) and/or the exon (or portion thereof) which are from or derived from BIN1 together comprise an alternative exon cassette. In some embodiments, the alternative exon cassette (which comprises the one or more introns (or portions thereof) and/or the exon (or portion thereof) which are from or derived from BIN1) comprises a polynucleotide having at least 70%, at least 75%, at least 80%, at least 90%, at least 92%, at least 95%, at least 98%, or at least 99% sequence identity, relative to a nucleic acid sequence as set forth in any one of SEQ ID NOs: 107-778. In some embodiments, the alternative exon cassette (which comprises the one or more introns (or portions thereof) and/or the exon (or portion thereof) which are from or derived from BIN1) comprises a polynucleotide having a nucleic acid sequence as set forth in any one of SEQ ID NOs: 107-778.

[0370] In some embodiments, an alternative exon cassette (e.g., which comprises the one or more introns (or portions thereof) and/or the exon (or portion thereof) which are from or derived from BIN1) is selected for inclusion in a transgene based on the psi values which the alternative exon cassette achieves in a specific tissue of interest (see, e.g., Table 4; Table 5). For example, if the coding region of the transgene encodes a protein which would be therapeutically useful in skeletal tissue (e.g., MTM1), but which would not be desirable to express in heart tissue, the alternative exon cassette selected for inclusion in a transgene would be one wherein a high psi value is observed for skeletal tissue, and wherein a low psi value is observed for heart tissue (e.g., the A psi between skeletal tissue and heart tissue is large). In some embodiments, wherein the coding region of the transgene encodes a protein which would be therapeutically useful in skeletal tissue (e.g., MTM1), but which would not be desirable to express in heart tissue, the alternative exon cassette selected from inclusion in a transgene would be one wherein a high psi value is observed for skeletal tissue. In some embodiments, wherein the coding region of the transgene encodes a protein which would be therapeutically useful in skeletal tissue (e.g., MTM1), but which would not be desirable to express in heart tissue, the alternative exon cassette selected from inclusion in a transgene would be one wherein a low psi value is observed for heart tissue. As will be understood, the alternative exon cassette which is included in a transgene may be selected based on a variety of factors including, but not limited to: the identity of the protein cargo to be encoded by the coding region of interest; the A psi observed between a first tissue (or condition, etc.) which is of interest and a second tissue (or condition, etc.) which is not of interest; the psi observed in a tissue (or condition, etc.) which is of interest; and/or the psi observed in a tissue (or condition, etc.) which is not of interest. However, various other factors may also impact which alternative exon cassette is selected for inclusion in a transgene, as described throughout the disclosure.

[0371] In some embodiments, an intron (or portion thereof) and/or an exon (or portion thereof) is from or derived from SMN1.

[0372] In some embodiments, an intron(s) is or is derived from intron 6 and/or intron 7 of SMN1. In some embodiments, the intron which is derived from SMN1 intron 6 is a fragment of (e.g., is truncated relative to) the wild-type or naturally occurring sequence of SMN1 intron 6. In some embodiments, the intron which is derived from SMN1 intron 6 comprises a polynucleotide having a nucleic acid sequence as set forth in SEQ ID NO: 103. In some embodiments, the intron which is derived from SMN1 intron 6 comprises a polynucleotide having at least 70%, at least 75%, at least 80%, at least 90%, at least 92%, at least 95%, at least 98%, or at least 99% sequence identity, relative to a nucleic acid sequence as set forth in SEQ ID NO: 103. In some embodiments, the intron which is derived from SMN1 intron 7 is a fragment of (e.g., is truncated relative to) the wild-type or naturally occurring sequence of SMN1 intron 7. In some embodiments, the intron which is derived from SMN1 intron 7 comprises a polynucleotide having a nucleic acid sequence as set forth in SEQ ID NO: 104. In some embodiments, the intron which is derived from SMN1 intron 7 comprises a polynucleotide having at least 70%, at least 75%, at least 80%, at least 90%, at least 92%, at least 95%, at least 98%, or at least 99% sequence identity, relative to a nucleic acid sequence as set forth in SEQ ID NO: 104.

[0373] In some embodiments, an exon is or is derived from exon 6 of SMN1. In some embodiments, the exon which is derived from SMN1 exon 6 is a fragment of (e.g., is truncated relative to) the wild-type or naturally occurring sequence of SMN1 exon 6. In some embodiments, the exon which is derived from SMN1 exon 6 comprises a polynucleotide having a nucleic acid sequence as set forth in SEQ ID NO: 102. In some embodiments, the exon which is derived from SMN1 exon 6 comprises a polynucleotide having at least 70%, at least 75%, at least 80%, at least 90%, at least 92%, at least 95%, at least 98%, or at least 99% sequence identity, relative to a nucleic acid sequence as set forth in SEQ ID NO: 102.

### (iv) Positive or Negative Regulatory Cis-Element

[0374] In other embodiments, the recombinant viral genomes of the present disclosure comprise one or more regulatory sequences. In some embodiments, the regulatory sequences impart a positive control on the expression of a coding sequence of interest. In other embodiments, the regulatory sequences impart a negative control on the expression of a coding sequence of interest. Regulatory sequences may be present, inserted, or otherwise included in an alternatively-spliced exon. Such sequences may be referred to as positive or negative regulatory control cis-elements or “regulatory cis-elements” or merely as “cis-elements.”

[0375] The one or more cis-elements located within an alternatively-spliced exon and which may influence the level of expression of a coding region of interest through positive and/or negative controls may comprehensively include any genetic element which exerts—as a consequence being spliced-in or spliced-out of the final mRNA—either a positive or negative regulation on the expression of the coding region. Non-limiting examples of positive or negative regulatory cis-elements located within the alternatively-spliced exons can include, without limitation, a translation start codon, a translation stop codon, a binding site for an RNA binding protein that serves to positively regulate mRNA translation, a binding site for an RNA binding protein that serves to negatively regulate mRNA translation, a binding site for a nucleic acid molecule (e.g., an miRNA) that serves to positively regulate mRNA translation, or a binding site for a nucleic acid molecule (e.g., an siRNA) that serves to negatively regulate mRNA stability or degradation, a binding site for an RNA binding protein that serves to positively regulate mRNA stability or degradation, a binding site for an RNA binding protein that serves to negatively regulate mRNA stability or degradation, a binding site for a nucleic acid molecule (e.g., an miRNA) that serves to positively regulate mRNA stability or degradation, a binding site for a nucleic acid molecule (e.g., an siRNA) that serves to negatively regulate mRNA stability or degradation, a nuclease recognition site, a sequence that can form a secondary structure that slows down translation (for example a stem loop that delays the ribosome), or a sequence that can form a secondary structure that promotes translation. This list of examples is not intended to place any limitation on the scope and meaning of the positive and negative cis-elements and the disclosure embraces any genetic element or region positioned within or at least associated with an alternatively-spliced exon which exerts a positive or negative control on the overall expression of a coding region of the transgene (e.g., encoding a therapeutic protein).

[0376] In some cases, the cis-element is located within the alternatively-spliced exon, but in other cases, the cis-element is separate from, but at least associated with, the alternatively-spliced exon, such that it is spliced-in or spliced-out at the same time as the alternatively-spliced exon. Non-limiting examples of positive or negative regulatory cis-elements can include, for instance, (1) a nucleotide sequence element that regulates, modulates, or otherwise affects the stability and/or degradation of a mRNA; and (2) a nucleotide sequence element that regulates, modulates, or otherwise affects the translation of a mRNA into one or more encoded polypeptide products (e.g., a therapeutic product).

[0377] In some embodiments, the one or more cis-elements can include, but are not limited to, a translation start codon, a translation stop codon, an siRNA binding site, a miRNA binding site, a sequence forming a stem-loop structure, a sequence forming an RNA dimerization motif, a sequence forming a hairpin structure, a sequence forming an RNA quadruplex, polypurine tract, a sequence forming a pair of kissing loops, and a sequence forming a tetraloop/tetraloop receptor pair. In some embodiments, cis-elements include binding sites recognized by regulatory elements, such as, for example, RNA binding proteins.

[0378] In some embodiments, an RNA binding protein may be involved in binding to one or more positive or negative cis-elements and, as such, may be involved in regulating the expression of the coding region of interest.

[0379] In some embodiments, the RNA binding protein is a sequence-specific RNA binding protein. In some embodiments, a useful sequence-specific RNA binding protein binds to a target sequence with a binding affinity (e.g., Kd) of 0.01-1000 nM or less (e.g., 0.01 to 1, 1-10, 10-50, 50-100, 100-500, 500-1,000 nM). In some embodiments, an RNA binding protein has serine/arginine domains that act as splicing enhancers, or glycine-rich domains that act as splicing repressors. In some embodiments, an RNA binding protein acts as an intronic splicing enhancer, intronic splicing silencer, exonic splicing enhancer, or exonic splicing silencer.

[0380] Different types of sequence-specific RNA binding proteins can be used. In some embodiments, a sequence-specific RNA binding protein is one that contains zinc fingers, RNA recognition motifs, KH domains, deadbox domains, or dsRBDs. Non-limiting examples of RBPs that contain zinc fingers include: MBNL, TIS11, or TTP. Non-limiting examples of RBPs that contain RNA recognition motifs include hnRNPs and SR proteins, RbFox, PTB, Tra2beta. Non-limiting examples of RNA binding proteins that contain KH domains include Nova, SF1, and FBP. Non-limiting examples of RNA binding proteins that contain deadbox domains are DDX5, DDX6, and DDX17. Non-limiting examples of RNA binding proteins that contain dsRBDs include ADAR, Staufen, and TRBP.

[0381] Further examples of these types of RNA binding proteins and their respective sequence specific binding motifs are known in the art, and can be found, for example, in Perez-Perri, J. I., et al., (2018), Nat. Comm., 9:4408; Van Nostrand, E. L., et al., (2020), Nature, 583, 711-19; and Corley, M., et al., (2020), Cell, (20): 30159-3, the contents of which are hereby incorporated by reference with respect to RNA protein binding sites and RNA binding proteins.

### (v) Splicing Factors

[0382] In some embodiments, the recombinant viral vector genomes may further comprise one or more regulatory sequences and/or genes encoding factors that regulate splicing, including splicing of the alternatively-spliced exon.

[0383] In some embodiments, that regulatory gene encodes a tissue-specific RNA binding protein, an autoregulatory RNA binding protein, or a condition-specific RNA binding protein. In some embodiments, the protein auto-regulates splicing of the mRNA encoded by the recombinant viral genome. In some embodiments, splicing can be regulated by two or more different splice regulatory proteins that bind to splicing regulatory regions. For example, in some embodiments, NRAP exon 12 is highly included in skeletal muscle but absent in heart. In some embodiments, TPM2 exon 2 is low in heart but high in smooth muscle. In some embodiments, SLC25A3 is very high in heart but low in brain. Many other examples can be found in the literature and one example of a list of such “switch-like exons” can be found in Wang, E. T., et al., (2008), Nature, 456(7221):470-6. Such sequences may be included in the recombinant viral genomes to further regulate splicing under certain desired conditions.

[0384] In some embodiments, the recombinant viral genome may further encode a splice-regulatory protein, which can include, for instance, MBNL protein, an SR protein (e.g., SRSF1, SRSF2, SRSF3, SRSF4, SRSF5, SRSF6, SRSF7, SRSF8, SRSF9, SRSF10, SRSF11, or SRSF12), an hnRNP protein, an RbFox protein, a CELF protein, a Nova protein, or a PTB protein.

[0385] In some embodiments, the viral vectors may also encode a splicing factor in the form of an RNA, which may comprise a regulatory RNA molecule, a short hairpin RNA molecule (shRNA), a microRNA molecule, a transfer RNA molecule (tRNA), or an RNA that comprises a DMPK-targeting shRNA or microRNA. The RNA that regulates splicing may also comprise a repeat-targeting shRNA or microRNA (e.g., a CUG shRNA, CAG shRNA, or GGGGCC shRNA), e.g., which targets an RNA binding protein or other member of a related biological pathway.

[0386] In some embodiments, the viral vectors may also encode a splicing factor that comprises a protein-RNA complex, the protein-RNA complex comprises a ribosome, snRNP complex, or other macromolecular complex that can interact with RNA to regulate splicing decisions. In some embodiments, wherein the intracellular factor comprises a protein-RNA complex, a snRNP complex comprises U1 snRNP or U2 snRNP. In some embodiments, wherein the intracellular factor comprises a protein-RNA complex, the RNA comprises a ribozyme that targets one or more CUG repeats. In some embodiments, wherein the intracellular factor comprises a protein-RNA complex, the RNA comprises a ribozyme that targets specific mRNAs.

[0387] Non-limiting examples of RNA binding protein motifs and RNA target sequences that can confer or regulate spicing activity are described, for example, in Ray, D., et al., (2014), Nature, 499(7457): 172-77; Lambert, N., et al., (2014), Mol. Cell., 54(5): 887-900; and Van Nostrand, E. L., et al., (2020), Nature, and may be incorporated in the recombinant viral vector genomes described herein to further regulate splicing activity.

### (vi) Nonsense Mediated Decay (NMD) Exons

[0388] In some embodiments, the recombinant viral vector genomes may comprise an alternatively-spliced exon cassette configured to regulate expression of a coding region of interest by including a nonsense mediated decay (NMD) exon (e.g., an alternative exon comprising a heterologous stop codon) within the RNA. In certain embodiments, the NMD exon is flanked by introns (or portion(s) thereof) for which alternative splicing is regulated. In some embodiments, an NMD exon is an exon that encodes at least one stop codon that is in frame with a previous exon, wherein the stop codon is upstream (5′) from the 3′ splice site of the exon. In various embodiments, the in-frame stop codon is inserted at least 100 nucleotides, at least 95 nucleotides, at least 90 nucleotides, at least 85 nucleotides, at least 80 nucleotides, at least 75 nucleotides, at least 70 nucleotides, at least 65 nucleotides, at least 60 nucleotides, at least 55 nucleotides, at least 50 nucleotides, at least 45 nucleotides, at least 40 nucleotides, at least 35 nucleotides, at least 30 nucleotides, at least 25 nucleotides, at least 20 nucleotides, at least 15 nucleotides, at least 10 nucleotides, or at least 5 nucleotides, or between 1 to 5 nucleotides upstream of the next 5′ splice junction.

[0389] In some embodiments, if the NMD exon is included in the spliced RNA, it causes degradation of the RNA via nonsense-mediated decay. In some embodiments, if the NMD exon is spliced out, the resulting transcript is stable, and in some embodiments encodes a functional (e.g., full-length) protein of interest.

[0390] In some embodiments, an alternatively-spliced exon cassette for which splicing is regulated is a construct configured to regulate expression of a protein by including a 5′ exon comprising an amino terminal amino acid encoding sequence (e.g., an ATG or part of the ATG) and/or translation control sequences, wherein the 5′ exon is separated from subsequent exon(s) by an intron for which splicing is regulated. In some embodiments, if the intron is spliced out of the RNA transcript, the recombinant 5′ exon is spliced in frame to the subsequent exon(s) and the resulting spliced transcript encodes a protein that is expressed. In some embodiments, if the intron is not spliced out of the RNA transcript, the recombinant 5′ exon is not spliced to the subsequent exon(s) and as a result a protein is not expressed from the transcript. In some embodiments, an intron (or portion thereof) for which splicing is regulated can be included within a gene that encodes a regulatory RNA (e.g., an siRNA). In some embodiments, an intron(s) (or portion thereof) for which splicing is regulated and that encodes regulatory RNA(s) can be included in an alternatively-spliced exon cassette encoding an RNA transcript.

(vii) Transgenes and Coding Regions Thereof

[0391] In various embodiments, the recombinant genomes disclosed herein may comprise one or more transgenes. A transgene may be recombinant (or “synthetic”), and may be modified to comprise an alternatively-spliced exon or an alternatively-spliced exon cassette described herein (e.g., see FIG. 1) such that the expression of the transgene or coding region of interest comes under the regulatory control of alternatively-spliced exon. A transgene (e.g., a coding region of a transgene) may encode any therapeutic agent, including, but not limited to a therapeutic protein, an antibody or fragment thereof, a bispecific antibody or fragment thereof, antigen-binding fragments, a nucleic acid molecule-based therapeutic (e.g., an siRNA, a microRNA, or an oligonucleotide), genome editing components (e.g., CRISPR/Cas9 based proteins and protein fusion and guide RNA molecules), and complexes (e.g., nucleoprotein complexes).

[0392] A coding region of a transgene may be naturally-occurring, and may in some embodiments comprise no nucleic acid modifications, relative to the coding region of a wild-type gene. In some embodiments, a coding region of a transgene may be synthetic. The coding region of a transgene may be considered synthetic if it undergoes one or more nucleic acid modifications, relative to the coding region of a wild-type gene. A nucleic acid modification may be a substitution or deletion of one or more nucleotides that form the nucleic acid sequence of the coding region of the transgene. In some embodiments, the modification comprises disrupting or deleting a native start codon located at the 5′ end of the coding region of the transgene. In some embodiments, the modification comprises the insertion of an alternatively-spliced exon into the coding region of the transgene.

[0393] In some embodiments, the coding region of the transgene may comprise one or more nucleic acid modifications (e.g., substitutions) such that the coding region comprises a “barcode” sequence. Barcode sequences may be useful in some embodiments to characterize the identity of the transgene (e.g., a transgene comprising a BIN1 alternative exon cassette and MTM1 coding sequence), for example when multiple transgenes are being tested together. In some embodiments, the wobble positions of five codons within the coding region of the transgene are modified to produce a barcode sequence. As will be understood, a “wobble position” is the third nucleic acid of a codon. Nucleic acids lying at wobble positions can be modified without altering the identity of the amino acid encoded by the associated codon (see FIG. 13, SEQ ID NO: 63). Thus, in some embodiments, the third nucleic acid of each of five consecutive codons in the coding region of the transgene is modified (e.g., 5 total substitutions are made; SEQ ID NOs: 65-75). In some embodiments, said modifications result in the formation of a barcode sequence which is 5 nucleic acid sequences in length. In some embodiments, the resultant barcode sequence is unique to the transgene within which it is comprised, and can be used to characterize the identity of said transgene.

[0394] In some embodiments, the five codons which are modified are located approximately 350 nucleotides from the 5′ end of the coding region of the transgene. In some embodiments, the five codons which are modified are located approximately 100, 125, 150, 175, 200, 225, 250, 275, 300, 325, 350, 375, 400, 425, 450, 475, 500, 525, or 550 nucleotides from the 5′ end of the coding region of the transgene. In some embodiments, the five codons which are modified are located approximately 100, 125, 150, 175, 200, 225, 250, 275, 300, 325, 350, 375, 400, 425, 450, 475, 500, 525, or 550 nucleotides from the 5′ end of the coding region of the transgene. In some embodiments, the five codons which are modified are located approximately 100-130, 120-150, 140-170, 160-190, 180-210, 200-230, 220-250, 240-270, 260-290, 280-310, 300-330, 320-350, 340-370, 370-400, 390-420, 410-440, 430-460, 450-480, 470-500, 490-520, 510-540, or 530-560 nucleotides from the 5′ end of the coding region of the transgene.

[0395] In some embodiments, a coding region of a transgene may naturally comprise one or more internal, out-of-frame ATG start codons. As will be understood, in the splicing condition wherein the alternative exon (comprising an ATG start codon at its 3′ end) is spliced-out, translation of the coding region via an alternate, out-of-frame ATG start codon located within the coding region of the transgene would be undesirable. However, any modification made to the coding region of the transgene must also preserve translation of the full-length protein when the alternative exon is spliced-in. Accordingly, in some embodiments one or more modifications are made to the coding region of the transgene which preserve translation of the full-length protein in the condition wherein the alternative exon is spliced-in, but which disrupt or terminate translation of the full-length protein in the condition wherein the alternative exon is spliced-out. In some embodiments, one or more nucleic acid substitutions are made within the coding region of the transgene to introduce one or more heterologous stop codons located downstream of (e.g., 3′ relative to) one or more of the internal, out-of-frame start codons located within the coding region of the transgene. As will be understood, such substitutions may comprise the substitution of 1, 2, or 3 nucleic acids to produce any of a TAA, TGA, or TAG stop codon, depending on the nucleic acids which are naturally present at the desired location within the coding sequence. Additionally or alternatively, in some embodiments a 3′ UTR intron is included in the transgene which elicits nonsense-mediated decay in the condition wherein the alternative exon is spliced-out (such that translation of the full-length protein is disrupted or terminated), but which preserves translation of the full-length protein in the condition wherein the alternative exon is spliced-in.

[0396] In some embodiments, the coding region of the transgene is from or is derived from a coding region from a gene selected from the group consisting of: MBNL1, MBNL2, MBNL3, hnRNP A1, hnRNP A2B1, hnRNP C, hnRNP D, hnRNP DL, hnRNP F, hnRNP H, hnRNP K, hnRNP L, hnRNP M, hnRNP R, hnRNP U, FUS, TDP43, PABPN1, ATXN2, TAF15, EWSR1, MATR3, TIA1, FMRP, MTM1, MTMR2, LAMP2, KIF5A, microdystrophin, C9ORF72, HTT, DNM2, BIN1, RYR1, NEB, ACTA, TPM3, TPM2, TNNT2, CFL2, KBTBD13, KLHL40, KLHL41, LMOD3, MYPN, SEPN1, TTN, SPEG, MYH7, TK2, POLG1, GAA, AGL, PYGM, SLC22A5, OCTN2, ETF, ETFH, PNPLA2, cytochrome b/cytochrome c oxidase, CLCN1, SCN4A, DMPK, CNBP, MYOT, LMNA (Lamin A/C), CAV3, DNAJB6, DES, TNPO3, HNRPDL, CAPN3, DYSF, alpha-sarcoglycan, beta-sarcoglycan, gamma-sarcoglycan, delta-sarcoglycan, TCAP, TRIM32, FKRP, FXN, POMT1, FKTN, POMT2, POMGnT1, DAG1, ANO5, PLEC1, TRAPPC11, GMPPB, ISPD, LIMS2, POPDC1, TOR1AIP1, POGLUT2, LAMA2, COL6A1, POMT1, POMT2, DUX4, EMD, PAX7, PMP22, MPZ, MFN2, SMCHD1, or GJB1. In some embodiments, the coding region of the transgene is from or is derived from a coding region of FXN.

[0397] In some embodiments, the coding region of the transgene is from or is derived from a coding region of MTM1. In some embodiments, the coding region of the transgene which is or is derived from MTM1 comprises a polynucleotide having at least 70%, at least 75%, at least 80%, at least 90%, at least 92%, at least 95%, at least 98%, or at least 99% sequence identity, relative to a nucleic acid sequence as set forth in SEQ ID NO: 1881. In some embodiments, the coding region of the transgene which is or is derived from MTM1 comprises a polynucleotide having a nucleic acid sequence as set forth in SEQ ID NO: 1881.

[0398] In some embodiments, the coding region of the transgene is from or is derived from a coding region of CAPN3. In some embodiments, the coding region of the transgene which is or is derived from CAPN3 comprises a polynucleotide having at least 70%, at least 75%, at least 80%, at least 90%, at least 92%, at least 95%, at least 98%, or at least 99% sequence identity, relative to a nucleic acid sequence as set forth in SEQ ID NO: 1882. In some embodiments, the coding region of the transgene which is or is derived from CAPN3 comprises a polynucleotide having a nucleic acid sequence as set forth in SEQ ID NO: 1882.

[0399] In other embodiments, the transgene may encode one or more therapeutic proteins (e.g., a biologic or biosimilar thereof), including, but not limited to: adalimumab, rituximab, pegfilgrastim, infliximab, bevacizumab, trastuzumab, etanercept, and epoetin.

### D. Packaging Recombinant Viral Genomes into Viral Vectors

[0400] Aspects of the present disclosure provide for the packaging of the herein disclosed recombinant viral genomes into viral vectors (i.e., complete viral particles which may infect cells to deliver the recombinant genomes, and the concomitant expression of the transgenes in a manner dependent on the alternatively-splice exons). Thus, in some embodiments a recombinant viral genome comprising an alternatively-spliced exon cassette as described herein is provided in a viral vector (e.g., an rAAV vector; a lentivirus vector). The viral vectors may include rAAV particles, lentivirus particles, or other viral vectors.

[0401] In some embodiments, the recombinant viral genomes packaged into the rAAV or lentiviral vectors further comprise a promoter. In some embodiments, the promoter is a constitutive promoter or a regulated promoter. In some embodiments, the regulated promoter is an inducible promoter. In some embodiments, the promoter comprises any one of: CMV, EF1alpha, CBh, synapsin, enolase, MECP2, MHCK7, Desmin, or GFAP.

[0402] In some embodiments, an MHCK7 promoter comprises a polynucleotide having at least 70%, at least 75%, at least 80%, at least 90%, at least 92%, at least 95%, at least 98%, or at least 99% sequence identity, relative to a nucleic acid sequence as set forth in SEQ ID NO: 1880. In some embodiments, an MHCK7 promoter comprises a polynucleotide having a nucleic acid sequence as set forth in SEQ ID NO: 1880.

[0403] In some embodiments, the promoter is a ubiquitous promoter. In some embodiments, a ubiquitous promoter is a promoter selected from the group consisting of: an EF1 alpha promoter, a beta actin promoter, CMV, CBh, and CAG promoter. In some embodiments, the promoter is a tissue-specific promoter, such as a muscle- or heart-biased promoter. In some embodiments, a tissue-specific promoter, such as a muscle- or heart-biased promoter, is a promoter selected from the group consisting of: a muscle creatine kinase promoter, a C5-12 muscle promoter, MHCK7, and Desmin. In some embodiments, the promoter is a neuronal-biased promoter. In some embodiments, a neuronal-biased promoter is a promoter selected from the group consisting of: synapsin and MECP2. In some embodiments, the promoter is an astrocyte-biased promoter. In some embodiments, an astrocyte-biased promoter is a GFAP promoter. Thus, in some embodiments, the nucleic acid comprises a promoter and sequence corresponding to an RNA molecule that is capable of being expressed from the nucleic acid.

[0404] In some embodiments, the recombinant viral genome is sufficiently small to be effectively packaged in an AAV viral particle (e.g., the gene construct may be around 0.5-5 kb long, for example around 4.9 kb, 4.8 kb, 4.7 kb, 4.6 kb, 4.5 kb, 4.4 kb, 4.3 kb, 4.2 kb, 4.1 kb, 4 kb, 3.5 kb, or 3 kb long). So as to fit into the AAV viral particle, in some embodiments a nucleic acid comprises one or more truncated and/or recombinant introns, as described elsewhere herein. Accordingly, a recombinant intron for an rAAV vector is typically shorter than 4 kb, but can be between around 20 bases long and around 2,000 bases long to provide space for other components (e.g., exons, regulatory sequences, other introns, viral packaging sequences) in the nucleic acid (e.g., recombinant gene) construct. In some embodiments a recombinant intron is around 50 bases, around 100 bases, around 250 bases, around 500 bases, around 1,000 bases, around 1,500 bases, or around 2,000 bases long. In some embodiments, a recombinant intron is shorter than 4 kb, shorter than 3 kb, shorter than 2 kb, shorter than 1 kb, 100-900 bases long, or shorter than 500 bases long.

[0405] In some embodiments, the recombinant viral genome contains sufficient viral sequences for packaging in a viral vector (e.g., an rAAV particle). For example, in some embodiments a recombinant viral genome is flanked by viral sequences (for example, terminal repeat sequences) that are useful to package the recombinant viral genome in a viral particle (e.g., encapsidated by viral capsid proteins and/or an envelope, where appropriate). In some embodiments, the flanking terminal repeat sequences are rAAV inverted terminal repeats (ITRs). In some embodiments, the AAV ITR sequences comprise AAV1, AAV2, AAV5, AAV7, AAV8, or AAV9 ITR sequences.

[0406] In some embodiments, the AAV ITR sequences comprise AAV2 ITR sequences. In some embodiments, an AAV2 ITR comprises a polynucleotide having at least 70%, at least 75%, at least 80%, at least 90%, at least 92%, at least 95%, at least 98%, or at least 99% sequence identity, relative to a nucleic acid sequence as set forth in SEQ ID NO: 1879. In some embodiments, an AAV2 ITR comprises a polynucleotide having a nucleic acid sequence as set forth in SEQ ID NO: 1879.

[0407] In some embodiments, the recombinant viral genome comprises a polynucleotide having at least 70%, at least 75%, at least 80%, at least 90%, at least 92%, at least 95%, at least 98%, or at least 99% sequence identity, relative to a nucleic acid sequence as set forth in either SEQ ID NO: 105 or SEQ ID NO: 106. In some embodiments, the recombinant viral genome comprises a polynucleotide having a nucleic acid sequence as set forth in either SEQ ID NO: 105 or SEQ ID NO: 106.

[0408] In some embodiments, the recombinant viral genome is a lentivirus genome comprising a DNA molecule, wherein the DNA molecule comprises sequences that encode an RNA molecule.

(i) Manufacture of rAAV Vectors

[0409] In some embodiments, the recombinant viral genome is encapsidated by an rAAV particle as described herein. The rAAV particle may be of any AAV serotype (e.g., 1, 2, 3, 4, 5, 6, 7, 8, 9, or 10), including any derivative (including non-naturally occurring variants of a serotype) or pseudotype. In some embodiments, the rAAV particle is an AAV8 particle, which may be pseudotyped with AAV2 ITRs. In some embodiments, an AAV2 ITR comprises a polynucleotide having at least 70%, at least 75%, at least 80%, at least 90%, at least 92%, at least 95%, at least 98%, or at least 99% sequence identity, relative to a nucleic acid sequence as set forth in SEQ ID NO: 1879. In some embodiments, an AAV2 ITR comprises a polynucleotide having a nucleic acid sequence as set forth in SEQ ID NO: 1879.

[0410] Non-limiting examples of derivatives and pseudotypes include AAV2-AAV3 hybrid, AAVrh.10, AAVhu.14, AAV3a/3b, AAVrh32.33, AAV-HSC15, AAV-HSC17, AAVhu.37, AAVrh.8, CHt-P6, AAV2.5, AAV6.2, AAV2i8, AAV-HSC15/17, AAVM41, AAV9.45, AAV6(Y445F/Y731F), AAV2.5T, AAV-HAE1/2, AAV clone 32/83, AAV5hH10, AAV2 (Y→F), AAV8 (Y733F), AAV2.15, AAV2.4, AAVM41, and AAVr3.45; or a derivative thereof. In some embodiments, the rAAV vector is of serotype AAV8. In some embodiments, the rAAV vector is pseudotyped. Such AAV serotypes and derivatives/pseudotypes, and methods of producing such derivatives/pseudotypes are known in the art (see, e.g., Mol Ther. 2012 April; 20(4):699-708. doi: 10.1038/mt.2011.287. 2012 Jan. 24. The AAV vector toolkit: poised at the clinical crossroads. Asokan A1, Schaffer D V, Samulski R J.). In some embodiments, the rAAV particle is a pseudotyped rAAV particle, which comprises (a) a nucleic acid vector comprising ITRs from one serotype (e.g., AAV2) and (b) a capsid comprised of capsid proteins derived from another serotype (e.g., AAV1, AAV3, AAV4, AAV5, AAV6, AAV7, AAV8, AAV9, or AAV10). Methods for producing and using pseudotyped rAAV vectors are known in the art (see, e.g., Duan et al., J. Virol., 75:7662-7671, 2001; Halbert et al., J. Virol., 74:1524-1532, 2000; Zolotukhin et al., Methods, 28:158-167, 2002; and Auricchio et al., Hum. Molec. Genet., 10:3075-3081, 2001).

[0411] Exemplary rAAV nucleic acid vectors useful according to the disclosure include single-stranded (ss) or self-complementary (sc) AAV nucleic acid vectors, such as single-stranded or self-complementary recombinant viral genomes.

[0412] Methods of producing rAAV particles and recombinant viral genomes are also known in the art and commercially available (see, e.g., Zolotukhin et al. Production and purification of serotype 1, 2, and 5 recombinant adeno-associated viral vectors. Methods 28 (2002) 158-167; and U.S. Patent Publication Numbers US20070015238 and US20120322861, which are incorporated herein by reference; and plasmids and kits available from ATCC and Cell Biolabs, Inc.). For example, a plasmid containing the recombinant viral genome may be combined with one or more helper plasmids, e.g., that contain a rep gene (e.g., encoding Rep78, Rep68, Rep52 and Rep40) and a cap gene (encoding VP1, VP2, and VP3, including a modified VP3 region), and transfected into a producer cell line such that the rAAV particle can be packaged and subsequently purified.

[0413] In some embodiments, the one or more helper plasmids includes a first helper plasmid comprising a rep gene and a cap gene and a second helper plasmid comprising a E1a gene, a E1b gene, a E4 gene, a E2a gene, and a VA gene. In some embodiments, the rep gene is a rep gene derived from AAV2 and the cap gene is derived from AAV2 and includes modifications to the gene in order to produce a modified capsid protein described herein. Helper plasmids, and methods of making such plasmids, are known in the art and commercially available (see, e.g., pDM, pDG, pDP1rs, pDP2rs, pDP3rs, pDP4rs, pDP5rs, pDP6rs, pDG(R484E/R585E), and pDP8.ape plasmids from PlasmidFactory, Bielefeld, Germany; other products and services available from Vector Biolabs, Philadelphia, PA; Cellbiolabs, San Diego, CA; Agilent Technologies, Santa Clara, Ca; and Addgene, Cambridge, MA; pxx6; Grimm et al. (1998), Novel Tools for Production and Purification of Recombinant Adenoassociated Virus Vectors, Human Gene Therapy, Vol. 9, 2745-2760; Kern, A. et al. (2003), Identification of a Heparin-Binding Motif on Adeno-Associated Virus Type 2 Capsids, Journal of Virology, Vol. 77, 11072-11081.; Grimm et al. (2003), Helper Virus-Free, Optically Controllable, and Two-Plasmid-Based Production of Adeno-associated Virus Vectors of Serotypes 1 to 6, Molecular Therapy, Vol. 7, 839-850; Kronenberg et al. (2005), A Conformational Change in the Adeno-Associated Virus Type 2 Capsid Leads to the Exposure of Hidden VP1 N Termini, Journal of Virology, Vol. 79, 5296-5303; and Moullier, P. and Snyder, R. O. (2008), International efforts for recombinant adeno-associated viral vector reference standards, Molecular Therapy, Vol. 16, 1185-1188).

[0414] An exemplary, non-limiting, rAAV particle production method is described next. One or more helper plasmids are produced or obtained, which comprise rep and cap ORFs for the desired AAV serotype and the adenoviral VA, E2A (DBP), and E4 genes under the transcriptional control of their native promoters. The cap ORF may also comprise one or more modifications to produce a modified capsid protein as described herein. HEK293 cells (available from ATCC®) are transfected via CaPO4-mediated transfection, lipids or polymeric molecules such as Polyethylenimine (PEI) with the helper plasmid(s) and a plasmid containing a nucleic acid vector described herein. The HEK293 cells are then incubated for at least 60 hours to allow for rAAV particle production. Alternatively, in another example Sf9-based producer stable cell lines are infected with a single recombinant baculovirus containing the nucleic acid vector. As a further alternative, in another example HEK293 or BHK cell lines are infected with a HSV containing the nucleic acid vector and optionally one or more helper HSVs containing rep and cap ORFs as described herein and the adenoviral VA, E2A (DBP), and E4 genes under the transcriptional control of their native promoters. The HEK293, BHK, or Sf9 cells are then incubated for at least 60 hours to allow for rAAV particle production. The rAAV particles can then be purified using any method known the art or described herein, e.g., by iodixanol step gradient, CsCl gradient, chromatography, or polyethylene glycol (PEG) precipitation.

[0415] As used herein, the terms “engineered” and “recombinant” cells are intended to refer to a cell into which an exogenous polynucleotide segment (such as DNA segment that leads to the transcription of a biologically active molecule) has been introduced. Therefore, engineered cells are distinguishable from naturally occurring cells, which do not contain a recombinantly introduced exogenous DNA segment. Engineered cells are, therefore, cells that comprise at least one or more heterologous polynucleotide segments introduced through the hand of man.

[0416] To express a therapeutic agent in accordance with the present invention one may prepare a tyrosine capsid-modified rAAV particle containing an expression vector that comprises a therapeutic agent-encoding nucleic acid segment under the control of one or more promoters. To bring a sequence “under the control of” a promoter, one positions the 5′ end of the transcription initiation site of the transcriptional reading frame generally between about 1 and about 50 nucleotides “downstream” of (i.e., 3′ of) the chosen promoter. The “upstream” promoter stimulates transcription of the DNA and promotes expression of the encoded polypeptide. This is the meaning of “recombinant expression” in this context. In some embodiments, the recombinant nucleic acid (e.g., viral) vector constructs are those that comprise an rAAV nucleic acid vector that contains a therapeutic gene of interest operably linked to one or more promoters that is capable of expressing the gene in one or more selected mammalian cells. Such nucleic acid vectors are described in detail herein.

[0417] In some embodiments, wherein the recombinant viral genome is an rAAV genome, the transgene comprising an alternatively-spliced exon cassette comprises a polynucleotide sequence as set forth in any one of SEQ ID NOs: 45-55. In some embodiments, wherein the recombinant viral genome is an rAAV genome, the transgene comprising an alternatively-spliced exon cassette comprises a polynucleotide sequence that is 90%, 91%, 92%, 93%, 94%, 95%, 96%, 97%, 98%, or 99% identical to any one of SEQ ID NOs: 45-55.

### (ii) Manufacture of Lentivirus Vectors

[0418] In some embodiments, a viral vector of the present disclosure comprises a recombinant lentivirus genome. Lentiviruses are the only type of virus that are diploid; they have two strands of RNA. The lentivirus is a retrovirus, meaning it has a single stranded RNA genome with a reverse transcriptase enzyme, which functions to perform transcription of the viral genetic material upon entering the cell. Lentiviruses also have a viral envelope with protruding glycoproteins that aid in attachment to the outer membrane of a host cell.

[0419] Within the lentivirus genome are RNA sequences that code for specific proteins that facilitate the incorporation of the viral sequences into genome of a host cell. The “gag” gene codes for the structural components of the viral nucleocapsid proteins: the matrix (MA/p17), the capsid (CA/p24) and the nucleocapsid (NC/p7) proteins. The “pol” domain codes for the reverse transcriptase and integrase enzymes. Lastly, the “env” domain of the viral genome encodes for the glycoproteins and envelope on the surface of the virus. The ends of the genome are flanked with long terminal repeats (LTRs). LTRs are necessary for integration of the dsDNA into the host chromosome. LTRs also serve as part of the promoter for transcription of the viral genes.

[0420] In some embodiments, the env, gag, and/or pol vector(s) forming the particle do not contain a nucleic acid sequence from the lentiviral genome that expresses an envelope protein. In some embodiments, a separate vector containing a nucleic acid sequence encoding an envelope protein operably linked to a promoter is used (e.g., an env vector). In some embodiments, such env vector also does not contain a lentiviral packaging sequence. In some embodiments, the env nucleic acid sequence encodes a lentiviral envelope protein.

[0421] The native lentivirus promoter is located in the U3 region of the 3′ LTR. As will be understood by those of skill in the art, the presence of the lentivirus promoter can in some embodiments interfere with heterologous promoters operably linked to a transgene. To minimize such interference and better regulate the expression of transgenes, in some embodiments the lentiviral promoter is deleted. In some embodiments, the lentivirus vector contains a deletion within the viral promoter. After reverse transcription, such a deletion is in some embodiments transferred to the 5′ LTR, yielding a vector/provirus that is incapable of synthesizing vector transcripts from the 5′ LTR in the next round of replication.

[0422] In some embodiments, the lentivirus particle is expressed by a vector system encoding the necessary viral proteins to produce a lentivirus particle. In some embodiments, there is at least one vector containing a nucleic acid sequence encoding the lentiviral Pol proteins necessary for reverse transcription and integration, operably linked to a promoter. In some embodiments, the Pol proteins are expressed by multiple vectors. In some embodiments, there is also a vector containing a nucleic acid sequence encoding the lentiviral Gag proteins necessary for forming a viral capsid operably linked to a promoter. In some embodiments, the gag-pol genes are on the same vector. In some embodiments, the gag nucleic acid sequence is on a separate vector than at least some of the pol nucleic acid sequence. In some embodiments, the gag nucleic acid sequence is on a separate vector from all the pol nucleic acid sequences that encode Pol proteins.

[0423] In some embodiments, the lentivirus vector does not contain nucleotides from the lentiviral genome that package lentiviral RNA, referred to as the lentiviral packaging sequence.

[0424] It will be understood that selective inclusion of envelopes could result in changes in infectivity, such that the lentivirus vector could infect many different types of cells, and could be targeted to specific cell types of interest. Accordingly, in some embodiments, the envelope protein is not from the lentivirus, but from a different virus. The resultant lentivirus particle is referred to as a pseudotyped particle. In some embodiments, env gene that encodes an envelope protein that targets an endocytic compartment such as that of the influenza virus, VSV-G, alpha viruses (Semliki forest virus, Sindbis virus), arenaviruses (lymphocytic choriomeningitis virus), flaviviruses (tick-borne encephalitis virus, Dengue virus), rhabdoviruses (vesicular stomatitis virus, rabies virus), and orthomyxoviruses (influenza virus) is used.

[0425] In some embodiments, the lentivirus is a human immunodeficiency virus (HIV1 or HIV2), a feline immunodeficiency virus (FIV), a bovine immunodeficiency virus (BIV), a caprine arthritis encephalitis virus, an equine infectious anemia virus, a jembrana disease virus, a puma lentivirus, aimian immunodeficiency virus, or a visna-maedi virus.

[0426] In some embodiments, a nucleic acid sequence encoding a transgene comprising an alternatively-spliced exon cassette of the present invention is inserted into the empty lentiviral particles by use of a plurality of vectors each containing a nucleic acid segment of interest and a lentiviral packaging sequence necessary to package lentiviral RNA into the lentiviral particles (the packaging vector). In some embodiments, the packaging vector contains a 5′ and 3′ lentiviral LTR with the desired nucleic acid segment inserted between them. The nucleic acid segment can be antisense molecules or, in some embodiments, encodes a therapeutic protein. As will be understood, proper orientation of the transgene within the lentiviral genome is necessary to avoid the loss of introns (e.g., the splicing-out of introns) during viral packaging. Accordingly, in some embodiments, the transgene is oriented in the anti-sense orientation within the lentiviral genome. In some embodiments, orienting the transgene in the anti-sense direction within the lentiviral genome avoids the loss of introns (e.g., the splicing-out of introns) during viral packaging.

[0427] In some embodiments, the packaging vector contains a selectable marker gene. Such marker genes are well known in the art and include such genes as green fluorescent protein (GFP), blue fluorescent protein (BFP), luciferase, LacZ, nerve growth factor receptor (NGFR), etc.

### E. Methods of Delivering Viral Vectors

[0428] Some aspects of the invention contemplate a method of treating a disease or condition in a subject comprising administering a viral vector of the present disclosure to a subject, wherein the viral vectors comprise a recombinant viral genome described herein. Accordingly, provided herein is a method of delivering the disclosed viral (e.g., rAAV; lentivirus) particles. In some embodiments, viral particles are delivered by administering any one of the compositions disclosed herein to a subject. In some embodiments, “administering” or “administration” means providing a material to a subject in a manner that is pharmacologically useful. In some embodiments, viral particles are delivered to one or more tissues and cell types in a subject. In some embodiments, viral particles are delivered to one or more of muscle, heart, CNS, and immune cells. In some embodiments, delivery of a viral particle restores transcriptome homeostasis.

[0429] Delivery vehicles, vectors, particles, nanoparticles, formulations and components thereof which are suitable for expression of one or more elements of an engineered AAV capsid system as described herein are as described in, for example, International Patent Application Publication Nos. WO 2021/050974 and WO 2021/077000 and International Application No. PCT/US2021/042812, the contents of each of which are incorporated by reference herein.

[0430] In some embodiments, a viral particle is administered to the subject parenterally. In some embodiments, a viral particle is administered to a subject subcutaneously, intraocularly, intravitreally, subretinally, intravenously (IV), intracerebro-ventricularly, intramuscularly, intrathecally (IT), intracisternally, intraperitoneally, enterally, via inhalation, topically, or by direct injection to one or more cells, tissues, or organs. In some embodiments, a viral particle is administered to the subject by injection into the hepatic artery or portal vein.

[0431] To “treat” a disease, as the term is used herein, means to reduce the frequency or severity of at least one sign or symptom of a disease or disorder experienced by a subject. The compositions described above or elsewhere herein are typically administered to a subject in an effective amount, that is, an amount capable of producing a desirable result. The desirable result will depend upon the active agent being administered. For example, an effective amount of rAAV particles may be an amount of the particles that are capable of transferring an expression construct to a host organ, tissue, or cell. A therapeutically acceptable amount may be an amount that is capable of treating a disease. As is well known in the medical and veterinary arts, dosage for any one subject depends on many factors, including the subject's size, body surface area, age, the particular composition to be administered, the active ingredient(s) in the composition, time and route of administration, general health, and other drugs being administered concurrently.

[0432] In some embodiments, a single composition comprising viral particles as disclosed herein is administered only once. In some embodiments, a subject may need more than 1 administration of a viral composition (e.g., 2, 3, 4, 5, 6, 7, 8, 9, or 10 or more times). For example, a subject may need to be provided a second administration of any one of the viral compositions as disclosed herein 1 day, 1 week, 1 month, 1 year, 2 years, 5 years, or 10 years after the subject was administered a first composition. In some embodiments, a first composition of viral particles is different from the second composition of viral particles.

[0433] In some embodiments, the administration of the composition is repeated at least once (e.g., at least once, at least twice, at least thrice, at least four times, at least five times, at least six times, at least 10 times, at least 25 times, or at least 50 times), and wherein the time between a repeated administration and a previous administration is at least 1 month (e.g., at least 1 month, at least 2 months, at least 3 months, at least 4 months, at least 5 months, at least 6 months, or at least 12 months). In some embodiments, the administration of the composition is repeated at least once, and wherein the time between a repeated administration and a previous administration is at least 1 year (e.g., at least 1, at least 2, at least 3, at least 4, at least 5, at least 10, or at least 20 years).

[0434] In some embodiments, the administration of the composition is facilitated by AAV capsids such as AAV1-9, e.g., with AAV2 ITRs, or other capsids that sufficiently deliver to affected tissues.

[0435] Additional AAV vectors are described in International Patent Application Publication No. WO 2019/2071632, the content of which is incorporated by reference herein.

[0436] Further AAV vectors are described in International Patent Application Publication Nos. WO 2020/086881 and WO 2020/235543, the contents of each of which are incorporated by reference herein.

[0437] Further AAV vectors are described in International Patent Application Publication Nos. WO 2005/033321; WO 2006/110689; WO 2007/127264; WO 2008/027084; WO 2009/073103; WO 2009/073104; WO 2009/105084; WO 2009/134681; WO 2009/136977; WO 2010/051367; WO 2010/138675; WO 2001/038187; WO 2012/112832; WO 2015/054653; WO 2016/179496; WO 2017/100791; WO 2017/019994; WO 2018/209154; WO 2019/067982; WO 2019/195701; WO 2019/217911; WO 2020/041498; WO 2020/210839; U.S. Pat. Nos. 7,906,111; 9,737,618; 10,265,417; 10,485,883; 10,695,441; 10,722,598; 8,999,678; 10,301,648; 10,626,415; 9,198,984; 10,155,931; 8,524,219; 9,206,238; 8,685,387; 9,359,618; 8,231,880; 8,470,310; 9,597,363; 8,940,290; 9,593,346; 10,501,757; 10,786,568; 10,973,928; 10,519,198; 8,846,031; 9,617,561; 9,884,071; 10,406,173; 9,596,220; 9,719,010; 10,117,125; 10,526,584; 10,881,548; 10,738,087; U.S. Patent Publication No. 2011-023353; U.S. Patent Publication No. 2019-0015527; U.S. Patent Publication No. 2020-155704; U.S. Patent Publication No 2017-0191079; U.S. Patent Publication No. 2019-0218574; U.S. Patent Publication No. 2020-0208176; U.S. Patent Publication No. 2020-0325491; U.S. Patent Publication No. 2019-0055523; U.S. Patent Publication No. 2020-0385689; U.S. Patent Publication No. 2009-0317417; U.S. Patent Publication No. 2016-0051603; U.S. Patent Publication No. 2016-00244783; U.S. Patent Publication No. 2017-0183636; U.S. Patent Publication No. 2020-0263201; U.S. Patent Publication No. 2020-0101099; U.S. Patent Publication No. 2020-0318082; U.S. Patent Publication No. 2018-0369414; U.S. Patent Publication No. 2019-0330278; U.S. Patent Publication No. 2020-0231986, the contents of each of which are incorporated by reference herein.

### F. Subjects

[0438] Aspects of the disclosure relate to methods for use with a subject (e.g., a mammal). In some embodiments, a mammalian subject is a human, a non-human primate, or other mammalian subject. In some embodiments, the subject has one or more mutations associated with aberrant intron and/or alternative splicing.

[0439] In some embodiments, a subject suffers from or is at risk of developing a disease or condition associated with aberrant splice regulation resulting in one or more symptoms of a disease or condition. Non-limiting examples of these diseases/conditions include instances in which the homeostasis of RNA binding proteins is altered (e.g., other repeat expansion diseases), or diseases/conditions in which there are mutations in RNA binding protein sequences. In some embodiments, the disease or condition is selected from: a repeat expansion disease, a laminopathy, a cardiomyopathy, a muscular dystrophy, a neurodegenerative disease, a cancer, an intellectual disability, and/or premature aging.

[0440] In a non-limiting example, compositions of this application are administered to a subject resulting in regulated overexpression of the RNA binding protein exhibiting aberrant activity. In another non-limiting example, compositions of this application are administered to a subject resulting in the regulated addition of additional non-mutated, non-aberrant RNA binding protein(s).

[0441] In some embodiments, the disease or condition is selected from the group consisting of: Dentatorubral-pallido-luysian atrophy (DRPLA), myotonic dystrophy type 1 (DM1), myotonic dystrophy type 2 (DM2), Fragile X syndrome of mental retardation (FMR1), Fragile X tremor ataxia syndrome (FXTAS), FRAXE mental retardation (FMR2), Friedreichs ataxia (FRDA), Huntington disease (HD), Huntington disease-like 2 (HDL2), Oculopharyngeal muscular dystrophy (OPMD), Myoclonic epilepsy type 1, Alzheimer's disease, ALS/FTD, spinocerebellar ataxia type 1 (SCA1), spinocerebellar ataxia type 2 (SCA2), spinocerebellar ataxia type 3 (SCA3), spinocerebellar ataxia type 6 (SCA6), spinocerebellar ataxia type 7 (SCAT), spinocerebellar ataxia type 8 (SCA8), spinocerebellar ataxia type 10 (SCA10), spinocerebellar ataxia type 12 (SCA12), spinocerebellar ataxia type 17 (SCA17), Syndromic/non-syndromic X-linked mental retardation, Emery-Dreifuss muscular dystrophy type 2, familial partial lipodystrophy, limb girdle muscular dystrophy type 1B, dilated cardiomyopathy, familial partial lipodystrophy, Charcot-Marie-Tooth disorder type 2B1, mandibuloacral dysplasia, childhood progeria syndrome (Hutchinson-Gilford syndrome), Werner syndrome, Dilated cardiomyopathy (DCM), Hypertrophic cardiomyopathy (HCM), Restrictive cardiomyopathy (RCM), Left Ventricular Non-compaction (LVNC), Arrhythmogenic Right Ventricular Dysplasia (ARVD), takotsubo cardiomyopathy, Duchenne muscular dystrophy, Becker muscular dystrophy, Limb-girdle muscular dystrophy, Facioscapulohumeral muscular dystrophy, Congenital muscular dystrophy, Oculopharyngeal muscular dystrophy, Distal muscular dystrophy, Emery-Dreifuss muscular dystrophy, dementia, Parkinson's disease (PD), a PD-related disorder, Prion disease, a motor neuron disease (MND), Progressive bulbar palsy (PBP), Progressive muscular atrophy (PMA), Primary lateral sclerosis (PLS), Spinal muscular atrophy (SMA), a bladder cancer, a breast cancer, a colorectal cancer, a kidney cancer, a lung cancer, a lymphoma, a melanoma, an oral cancer, an ovarian cancer, an oropharyngeal cancer, a pancreatic cancer, a prostate cancer, a thyroid cancer, a uterine cancer, Down syndrome, Prader-Willi Syndrome (PWS), Bloom Syndrome, Cockayne Syndrome Type I-216400, Cockayne Syndrome Type III, Cockayne Syndrome Type I, Hutchinson-Gilford Progeria Syndrome, Mandibuloacral Dysplasia with Type A Lipodystrophy, Progeria, Adult Onset Progeroid Syndrome, Neonatal Rothmund-Thomson Syndrome, Seip Syndrome, Werner Syndrome, Replication Focus-Forming Activity 1, myotubular myopathy, Danon Disease, and/or centronuclear myopathy.

[0442] Non-limiting examples of symptoms of these diseases/conditions include neurodevelopmental, neurofunctional, or neurodegenerative changes (e.g., ALS, FTD, Spinocerebellar Ataxias, FXTAS, or Huntington's Disease symptoms) or abnormal proliferation or migration of cells (e.g., as in cancer). For example, myotonic dystrophy type 1 and type 2 (dystrophia myotonica, DM1 and DM2, respectively) are caused by expanded CTG repeats in the DMPK gene and CCTG repeats in the CNBP gene, respectively. Both diseases are highly multi-systemic with symptoms in skeletal muscles, cardiac tissue, gastrointestinal tract, endocrine system, and central nervous system, among others.

[0443] In some aspects, the present disclosure relates to methods and compositions that are useful for treating myotonic dystrophy type 1 and type 2 (dystrophia myotonica, DM1 and DM2, respectively), for example by delivering viral particles comprising viral constructs (e.g., containing one or more alternative spicing cassettes) to cells or tissue in a subject. In addition to the symptoms described above, DM1 can also manifest in a severe form called congenital DM1, in which profound developmental delays occur. A 25% chance of death before the age of 18 months and 50% chance of survival into mid-30s has been reported. Methods and compositions of the application can be useful to treat, alleviate, or otherwise improve one or more symptoms of DM1.

[0444] Accordingly, in some embodiments one or more viral constructs can be delivered to a subject having one or more symptoms of myotonic dystrophy. Such symptoms may include, but are not limited to, delayed muscle relaxation, muscle weakness, prolonged involuntary muscle contraction, loss of muscle, abnormal heart rhythm, cataracts, or difficulty swallowing. In some embodiments, a viral composition provided herein is administered to a subject having congenital DM1 or DM2. In some embodiments, the viral constructs treat, alleviate, ameliorate, or otherwise improve one or more symptoms associated with DM1 and/or DM2. In some embodiments, the viral constructs reduce muscle weakness, reduce muscle loss, reduce muscle wasting, reduce prolonged muscle contractions, improve speech, and/or improve swallowing in a subject. In some embodiments, treatment reduces or corrects one or more other symptoms of myotonic dystrophy.

[0445] In some embodiments, splicing of a recombinant intron and/or an alternatively-spliced exon is sufficiently regulated to be therapeutically effective.

### G. Enumerated Embodiments

[0446] Certain embodiments are set forth in the enumerated clauses below.

Clause 1. A recombinant viral genome for delivering a transgene, wherein said genome comprises at least one alternatively-spliced exon cassette comprising at least one alternatively-spliced exon, at least one flanking intron, and a coding region of the transgene.
Clause 2. The viral genome of clause 1, wherein the alternatively-spliced exon is retained in the spliced transcript.
Clause 3. The viral genome of clause 1 or clause 2, wherein the alternatively-spliced exon cassette further comprises at least one constitutive exon.
Clause 4. The viral genome of any preceding clause, wherein the alternatively-spliced exon cassette comprises one flanking intron.
Clause 5. The viral genome of clause 4, wherein the flanking intron is located 3′ or 5′ to the alternatively-spliced exon.
Clause 6. The viral genome of any one of clauses 1-3, wherein the alternatively-spliced exon cassette comprises two flanking introns.
Clause 7. The viral genome of any preceding clause, wherein the alternatively-spliced exon comprises at least one modification, relative to a naturally occurring alternatively-spliced exon.
Clause 8. The viral genome of any preceding clause, wherein the alternatively-spliced exon comprises at its 3′ end a heterologous start codon or part of a heterologous start codon.
Clause 9. The viral genome of clause 8, wherein all native start codons located 5′ to the heterologous start codon are disrupted or deleted.
Clause 10. The viral genome of any preceding clause, wherein the alternatively-spliced exon is located 5′ to the coding region of the transgene.
Clause 11. The viral genome of any one of clauses 1-7, wherein the alternatively-spliced exon cassette comprises two alternatively-spliced exons, each with flanking introns.
Clause 12. The viral genome of clause 11, wherein the two alternatively-spliced exons are adjacent.
Clause 13. The viral genome of clause 11 or clause 12, wherein the constitutive exon is located 5′ to the two alternatively-spliced exons.
Clause 14. The viral genome of any one of clauses 11-13, wherein each alternatively-spliced exon comprises at its 3′ end a heterologous start codon or part of a heterologous start codon.
Clause 15. The viral genome of clause 14, wherein all native start codons located 5′ to the heterologous start codon of the 5′-most alternatively-spliced exon are disrupted or deleted.
Clause 16. The viral genome of any one of clauses 11-15, wherein only one of the two alternatively-spliced exons is retained in the spliced transcript.
Clause 17. The viral genome of any one of clauses 11-16, wherein the 5′-most alternatively-spliced exon is retained in the spliced transcript.
Clause 18. The viral genome of any one of clauses 11-16, wherein the 3′-most alternatively-spliced exon is retained in the spliced transcript.
Clause 19. The viral genome of any preceding clause, wherein the alternatively-spliced exon(s) and flanking intron(s) are located within the coding region of the transgene.
Clause 20. The viral genome of any preceding clause, wherein the alternatively-spliced exon comprises a heterologous, in-frame stop codon.
Clause 21. The viral genome of clause 20, wherein the heterologous, in-frame stop codon is at least 50 nucleotides upstream of the next 5′ splice junction.
Clause 22. The viral genome of clause 20 or clause 21, wherein the heterologous stop codon elicits nonsense-mediated decay.
Clause 23. The viral genome of any preceding clause, wherein the alternatively-spliced exon is retained in the spliced transcript in distinct tissues or in distinct cell types.
Clause 24. The viral genome of any preceding clause, wherein the alternatively-spliced exon is retained in the spliced transcript in the presence of activated T cells, and/or in states of inflammation.
Clause 25. The viral genome of any preceding clause, wherein the alternatively-spliced exon is retained in the spliced transcript in cells exhibiting one or more signs or symptoms of a disease state, and/or in cells exhibiting non-homeostatic levels of the protein encoded by the natural gene comprising the transgene.
Clause 26. The viral genome of any preceding clause, wherein the alternatively-spliced exon comprises an alternatively-spliced exon from a gene selected from the group consisting of ABCC1, AK125149, ASCC2, BAT2D1, BBX, BRD8, BRE, C17orf70, CAMKK2, CBFB, CCAR1, CCDC7CD6, CHTF8, COL4A3BP, COL6A3, CUGBP1, CUGBP2, CXorf45, DENND3, DGUOK, DKFZp762G094, DNAJC7, DNASE1, EIF4A2, EIF4G2, EIF4H, EXOC7, EZH2, FAM120A, FAM136A, FAM36A, FARSB, FBXO38, FGFR1OP2, FIP1L1, FOXRED1, FUBP3, GALT, GATA3, GOLGA2, HIF1A, HMMR, HRB, IKZF1, ILF3, IRAK4, IRF1, KCTD13, LEF1, LUC7L, LYRM1, MALT1 e7, MAP2K7, MAP3K7, MAP4K2, MBNL2, MFF, NAE1, NCSTN, NR4A3, NRF1, NUP98, PARP6, PCM1, PLAUR, PLSCR3, PPIL5, PPP5C, PTPRC-E4, PTPRC-E6, PTS, RABL5, RAPH1, SEC16A, SFRS3, SFRS7, SLMAP, SNRNP70, STAT6, TBC1D1, TIMM8B, TIR8, TRA2A, TROVE2, UGCGL1, VAP-B, VAV1, ZNF384, ZNF496, CAMK2B, PKP2, LGMN, NRAP, VPS39, KSR1, PDLIM3, BIN1, ARFGAP2, KIF13A, and/or PICALM.
Clause 27. The viral genome of any preceding clause, wherein the alternatively-spliced exon comprises an alternatively-spliced exon comprising a polynucleotide sequence as set forth in any one of SEQ ID NOs: 23-44.
Clause 28. The viral genome of any preceding clause, wherein the flanking intron(s) is a native flanking intron(s) of the alternatively-spliced exon(s).
Clause 29. The viral genome of any preceding clause, wherein the flanking intron(s) comprises at its 5′ end a 5′ splice donor site.
Clause 30. The viral genome of any preceding clause, wherein the flanking intron(s) comprises at its 3′ end a 3′ splice donor site.
Clause 31. The viral genome of any preceding clause, wherein the flanking intron(s) comprises no modifications, relative to a naturally occurring intron.
Clause 32. The viral genome of any one of clauses 1-31, wherein the flanking intron(s) comprises at least one modification, relative to a naturally occurring intron.
Clause 33. The viral genome of clause 32, wherein the modification is a substitution or deletion of one or more nucleotides.
Clause 34. The viral genome of any preceding clause, wherein the flanking intron(s) is a regulated intron.
Clause 35. The viral genome of any preceding clause, wherein the flanking intron(s) comprises an intron from a gene selected from the group consisting of ABCC1, AK125149, ASCC2, BAT2D1, BBX, BRD8, BRE, C17orf70, CAMKK2, CBFB, CCAR1, CCDC7CD6, CHTF8, COL4A3BP, COL6A3, CUGBP1, CUGBP2, CXorf45, DENND3, DGUOK, DKFZp762G094, DNAJC7, DNASE1, EIF4A2, EIF4G2, EIF4H, EXOC7, EZH2, FAM120A, FAM136A, FAM36A, FARSB, FBXO38, FGFR1OP2, FIP1L1, FOXRED1, FUBP3, GALT, GATA3, GOLGA2, HIF1A, HMMR, HRB, IKZF1, ILF3, IRAK4, IRF1, KCTD13, LEF1, LUC7L, LYRM1, MALT1 e7, MAP2K7, MAP3K7, MAP4K2, MBNL2, MFF, NAE1, NCSTN, NR4A3, NRF1, NUP98, PARP6, PCM1, PLAUR, PLSCR3, PPIL5, PPP5C, PTPRC-E4, PTPRC-E6, PTS, RABL5, RAPH1, SEC16A, SFRS3, SFRS7, SLMAP, SNRNP70, STAT6, TBC1D1, TIMM8B, TIR8, TRA2A, TROVE2, UGCGL1, VAP-B, VAV1, ZNF384, ZNF496, CAMK2B, PKP2, LGMN, NRAP, VPS39, KSR1, PDLIM3, BIN1, ARFGAP2, KIF13A, and/or PICALM.
Clause 36. The viral genome of any preceding clause, wherein the flanking intron(s) comprises an intron comprising a polynucleotide sequence as set forth in any one of SEQ ID NOs: 1-22, 103, and 104.
Clause 37. The viral genome of any one of clauses 3-36, wherein the constitutive exon is a native exon of the transgene.
Clause 38. The viral genome of any one of clauses 3-36, wherein the constitutive exon is not a native exon of the transgene.
Clause 39. The viral genome of any one of clauses 3-38, wherein the constitutive exon is from the same gene as the alternatively-spliced exon(s).
Clause 40. The viral genome of clause 39, wherein the gene is the transgene.
Clause 41. The viral genome of any one of clauses 3-38, wherein the constitutive exon is not from the same gene as the alternatively-spliced exon(s).
Clause 42. The viral genome of any one of clauses 39-41, wherein the gene is a gene selected from the group consisting of MBNL1, MBNL2, MBNL3, hnRNP A1, hnRNP A2B1, hnRNP C, hnRNP D, hnRNP DL, hnRNP F, hnRNP H, hnRNP K, hnRNP L, hnRNP M, hnRNP R, hnRNP U, FUS, TDP43, PABPN1, ATXN2, TAF15, EWSR1, MATR3, TIA1, FMRP, MTM1, MTMR2, LAMP2, KIF5A, a microdystrophin-encoding gene, C9ORF72, HTT, DNM2, BIN1, RYR1, NEB, ACTA, TPM3, TPM2, TNNT2, CFL2, KBTBD13, KLHL40, KLHL41, LMOD3, MYPN, SEPN1, TTN, SPEG, MYH7, TK2, POLG1, GAA, AGL, PYGM, SLC22A5, OCTN2, ETF, ETFH, PNPLA2, a cytochrome b oxidase-encoding gene, a cytochrome c oxidase-encoding gene, CLCN1, SCN4A, DMPK, CNBP, MYOT, LMNA, CAV3, DNAJB6, DES, TNPO3, HNRPDL, CAPN3, DYSF, an alpha-sarcoglycan-encoding gene, a beta-sarcoglycan-encoding gene, a gamma-sarcoglycan-encoding gene, a delta-sarcoglycan-encoding gene, TCAP, TRIM32, FKRP, FXN, POMT1, FKTN, POMT2, POMGnT1, DAG1, ANO5, PLEC1, TRAPPC11, GMPPB, ISPD, LIMS2, POPDC1, TOR1AIP1, POGLUT2, LAMA2, COL6A1, POMT1, POMT2, DUX4, EMD, PAX7, PMP22, MPZ, MFN2, SMCHD1, SMN, Lamin A/C (LAMN), GJB1, ABCC1, AK125149, ASCC2, BAT2D1, BBX, BRD8, BRE, C17orf70, CAMKK2, CBFB, CCAR1, CCDC7CD6, CHTF8, COL4A3BP, COL6A3, CUGBP1, CUGBP2, CXorf45, DENND3, DGUOK, DKFZp762G094, DNAJC7, DNASE1, EIF4A2, EIF4G2, EIF4H, EXOC7, EZH2, FAM120A, FAM136A, FAM36A, FARSB, FBXO38, FGFR1OP2, FIP1L1, FOXRED1, FUBP3, GALT, GATA3, GOLGA2, HIF1A, HMMR, HRB, IKZF1, ILF3, IRAK4, IRF1, KCTD13, LEF1, LUC7L, LYRM1, MALT1 e7, MAP2K7, MAP3K7, MAP4K2, MBNL2, MFF, NAE1, NCSTN, NR4A3, NRF1, NUP98, PARP6, PCM1, PLAUR, PLSCR3, PPIL5, PPP5C, PTPRC-E4, PTPRC-E6, PTS, RABL5, RAPH1, SEC16A, SFRS3, SFRS7, SLMAP, SNRNP70, STAT6, TBC1D1, TIMM8B, TIR8, TRA2A, TROVE2, UGCGL1, VAP-B, VAV1, ZNF384, ZNF496, CAMK2B, PKP2, LGMN, NRAP, VPS39, KSR1, PDLIM3, BIN1, ARFGAP2, KIF13A, and/or PICALM.
Clause 43. The viral genome of any preceding clause, further comprising a promoter.
Clause 44. The viral genome of clause 43, wherein the promoter is a native promoter of the transgene.
Clause 45. The viral genome of clause 43, wherein the promoter is not a native promoter of the transgene.
Clause 46. The viral genome of any one of clauses 43-45, wherein the promoter is constitutive.
Clause 47. The viral genome of any one of clauses 43-45, wherein the promoter is inducible.
Clause 48. The viral genome of any one of clauses 43-47, wherein the promoter is a tissue-specific promoter.
Clause 49. The viral genome of any one of clauses 43-48, wherein the promoter is selected from the group consisting of an EF1 alpha promoter, beta actin promoter, CMV, muscle creatine kinase promoter, C5-12 muscle promoter, MHCK7, CBh, synapsin, MECP2, enolase, GFAP, Desmin, and CAG promoter.
Clause 50. The viral genome of any one of clauses 43-49, wherein the promoter drives expression of the transgene.
Clause 51. The viral genome of any one of clauses 1-50, wherein the coding region of the transgene comprises at least one modification, relative to a coding region of a naturally occurring gene.
Clause 52. The viral genome of clause 51, wherein the modification is a substitution or deletion of at least one nucleotide.
Clause 53. The viral genome of clause 51 or clause 52, wherein the coding region of the transgene comprises a deletion of a native start codon, or a portion thereof.
Clause 54. The viral genome of any preceding clause, wherein the transgene comprises one or more recombinant introns.
Clause 55. The viral genome of any one of clauses 51-54, wherein the naturally occurring gene is a gene selected from the group consisting of MBNL1, MBNL2, MBNL3, hnRNP A1, hnRNP A2B1, hnRNP C, hnRNP D, hnRNP DL, hnRNP F, hnRNP H, hnRNP K, hnRNP L, hnRNP M, hnRNP R, hnRNP U, FUS, TDP43, PABPN1, ATXN2, TAF15, EWSR1, MATR3, TIA1, FMRP, MTM1, MTMR2, LAMP2, KIF5A, a microdystrophin-encoding gene, C9ORF72, HTT, DNM2, BIN1, RYR1, NEB, ACTA, TPM3, TPM2, TNNT2, CFL2, KBTBD13, KLHL40, KLHL41, LMOD3, MYPN, SEPN1, TTN, SPEG, MYH7, TK2, POLG1, GAA, AGL, PYGM, SLC22A5, OCTN2, ETF, ETFH, PNPLA2, a cytochrome b oxidase-encoding gene, a cytochrome c oxidase-encoding gene, CLCN1, SCN4A, DMPK, CNBP, MYOT, LMNA, CAV3, DNAJB6, DES, TNPO3, HNRPDL, CAPN3, DYSF, an alpha-sarcoglycan-encoding gene, a beta-sarcoglycan-encoding gene, a gamma-sarcoglycan-encoding gene, a delta-sarcoglycan-encoding gene, TCAP, TRIM32, FKRP, FXN, POMT1, FKTN, POMT2, POMGnT1, DAG1, ANDS, PLEC1, TRAPPC11, GMPPB, ISPD, LIMS2, POPDC1, TOR1AIP1, POGLUT2, LAMA2, COL6A1, POMT1, POMT2, DUX4, EMD, PAX7, PMP22, MPZ, MFN2, SMCHD1, SMN, Lamin A/C (LAMN), and/or GJB1.
Clause 56. The viral genome of any preceding clause, wherein the viral genome is a genome from a recombinant adeno-associated virus (rAAV), lentivirus, retrovirus, or foamyvirus.
Clause 57. The viral genome of clause 56, wherein the viral genome is from an rAAV.
Clause 58. The viral genome of clause 56 or clause 57, wherein the transgene is flanked by AAV inverted terminal repeat (ITR) sequences.
Clause 59. The viral genome of clause 58, wherein the ITR sequences comprise AAV1, AAV2, AAV5, AAV7, AAV8, or AAV9 ITR sequences.
Clause 60. The viral genome of clause 56, wherein the viral genome is from a lentivirus.
Clause 61. The viral genome of clause 60, wherein the alternatively-spliced exon cassette is located on the minus strand of the lentivirus genome.
Clause 62. The viral genome of any preceding clause, further comprising a 3′ untranslated region (UTR) that is endogenous or exogenous to the transgene.
Clause 63. The viral genome of clause 62, wherein the exogenous 3′ UTR is the 3′ UTR from bovine growth hormone, SV40, EBV, or Myc.
Clause 64. A viral particle comprising a viral genome according to any preceding clause. Clause 65. The viral particle of clause 64, wherein the viral particle is an rAAV particle. Clause 66. The viral particle of clause 65, wherein the rAAV particle comprises AAV serotype 1, 2, 3, 4, 5, 6, 7, 8, 9, or 10.
Clause 67. The viral particle of clause 65, wherein the rAAV particle comprises AAV derivative or pseudotype AAV2-AAV3 hybrid, AAVrh.10, AAVhu.14, AAV3a/3b, AAVrh32.33, AAV-HSC15, AAV-HSC17, AAVhu.37, AAVrh.8, CHt-P6, AAV2.5, AAV6.2, AAV2i8, AAV-HSC15/17, AAVM41, AAV9.45, AAV6(Y445F/Y731F), AAV2.5T, AAV-HAE1/2, AAV clone 32/83, AAV5hH10, AAV2 (Y→F), AAV8 (Y733F), AAV2.15, AAV2.4, AAVM41, and AAVr3.45.
Clause 68. The viral particle of any one of clauses 64-67, further comprising at least one helper plasmid.
Clause 69. The viral particle of clause 68, wherein the helper plasmid comprises a rep gene and a cap gene.
Clause 70. The viral particle of clause 69, wherein the rep gene encodes Rep78, Rep68, Rep52, or Rep40.
Clause 71. The viral particle of clause 69 or clause 70, wherein the cap gene encodes a VP1, VP2, and/or VP3 region of the viral capsid protein.
Clause 72. The viral particle of any one of clauses 68-71, wherein the viral particle comprises two helper plasmids.
Clause 73. The viral particle of clause 72, wherein the first helper plasmid comprises a rep gene and a cap gene and the second helper plasmid comprises a E1a gene, a E1b gene, a E4 gene, a E2a gene, and a VA gene.
Clause 74. The viral particle of clause 64, wherein the viral particle is a recombinant lentivirus particle.
Clause 75. The viral particle of clause 74, wherein the lentivirus is a human immunodeficiency virus (HIV1 or HIV2), a feline immunodeficiency virus (FIV), a bovine immunodeficiency virus (BIV), a caprine arthritis encephalitis virus, an equine infectious anemia virus, a jembrana disease virus, a puma lentivirus, aimian immunodeficiency virus, or a visna-maedi virus.
Clause 76. The viral particle of clause 74 or clause 75, further comprising a viral envelope.
Clause 77. A method of treating a disease or condition in a subject comprising administering a viral genome according to any one of clauses 1-63 or a viral particle according to any one of clauses 64-76 to the subject.
Clause 78. The method of clause 77, wherein the subject is a mammal.
Clause 79. The method of clause 78, wherein the mammal is a human.
Clause 80. The method of any one of clauses 77-79, wherein the viral genome or viral particle is administered to the subject at least one time.
Clause 81. The method of clause 80, wherein the viral genome or viral particle is administered to the subject 2, 3, 4, 5, 6, 7, 8, 9, or 10 times.
Clause 82. The method of any one of clauses 77-81, wherein the viral genome or viral particle is administered to the subject parenterally, subcutaneously, intraocularly, intravitreally, subretinally, intravenously (IV), intracerebro-ventricularly, intramuscularly, intrathecally (IT), intracisternally, intraperitoneally, enterally, via inhalation, topically, or by direct injection to one or more cells, tissues, or organs.
Clause 83. The method of any one of clauses 77-82, wherein the viral genome or viral particle is administered to the subject by intravenous injection, intramuscular injection, intrathecal injection, or intravitreal injection.
Clause 84. The method of any one of clauses 77-83, wherein the disease or condition is a disease or condition selected from the group consisting of Dentatorubral-pallido-luysian atrophy (DRPLA), myotonic dystrophy type 1 (DM1), myotonic dystrophy type 2 (DM2), Fragile X syndrome of mental retardation (FMR1), Fragile X tremor ataxia syndrome (FXTAS), FRAXE mental retardation (FMR2), Friedreichs ataxia (FRDA), Huntington disease (HD), Huntington disease-like 2 (HDL2), Oculopharyngeal muscular dystrophy (OPMD), Myoclonic epilepsy type 1, Alzheimer's disease, ALS/FTD, spinocerebellar ataxia type 1 (SCA1), spinocerebellar ataxia type 2 (SCA2), spinocerebellar ataxia type 3 (SCA3), spinocerebellar ataxia type 6 (SCA6), spinocerebellar ataxia type 7 (SCAT), spinocerebellar ataxia type 8 (SCA8), spinocerebellar ataxia type 10 (SCA10), spinocerebellar ataxia type 12 (SCA12), spinocerebellar ataxia type 17 (SCA17), Syndromic/non-syndromic X-linked mental retardation, Emery-Dreifuss muscular dystrophy type 2, familial partial lipodystrophy, limb girdle muscular dystrophy type 1B, dilated cardiomyopathy, familial partial lipodystrophy, Charcot-Marie-Tooth disorder type 2B1, mandibuloacral dysplasia, childhood progeria syndrome (Hutchinson-Gilford syndrome), Werner syndrome, Dilated cardiomyopathy (DCM), Hypertrophic cardiomyopathy (HCM), Restrictive cardiomyopathy (RCM), Left Ventricular Non-compaction (LVNC), Arrhythmogenic Right Ventricular Dysplasia (ARVD), takotsubo cardiomyopathy, Duchenne muscular dystrophy, Becker muscular dystrophy, Limb-girdle muscular dystrophy, Facioscapulohumeral muscular dystrophy, Congenital muscular dystrophy, Oculopharyngeal muscular dystrophy, Distal muscular dystrophy, Emery-Dreifuss muscular dystrophy, dementia, Parkinson's disease (PD), a PD-related disorder, Prion disease, a motor neuron disease (MND), Progressive bulbar palsy (PBP), Progressive muscular atrophy (PMA), Primary lateral sclerosis (PLS), Spinal muscular atrophy (SMA), a bladder cancer, a breast cancer, a colorectal cancer, a kidney cancer, a lung cancer, a lymphoma, a melanoma, an oral cancer, an ovarian cancer, an oropharyngeal cancer, a pancreatic cancer, a prostate cancer, a thyroid cancer, a uterine cancer, Down syndrome, Prader-Willi Syndrome (PWS), Bloom Syndrome, Cockayne Syndrome Type I-216400, Cockayne Syndrome Type III, Cockayne Syndrome Type I, Hutchinson-Gilford Progeria Syndrome, Mandibuloacral Dysplasia with Type A Lipodystrophy, Progeria, Adult Onset Progeroid Syndrome, Neonatal Rothmund-Thomson Syndrome, Seip Syndrome, Werner Syndrome, Replication Focus-Forming Activity 1, myotubular myopathy, Danon Disease, and/or centronuclear myopathy.
Clause 85. A method of regulating transgene expression using a viral vector comprising a viral genome, the method comprising:
[0447] (a) inserting into the viral genome at least one alternatively-spliced exon cassette, wherein the alternatively-spliced exon cassette comprises a constitutive exon, at least one alternatively-spliced exon, at least one flanking intron, and a coding region of a transgene;
[0448] (b) introducing a heterologous start codon or part of a heterologous start codon at the 3′ end of the alternatively-spliced exon;
[0449] (c) disrupting or deleting all native start codons located 5′ to the heterologous start codon; and
[0450] (d) deleting a native start codon, or a portion thereof, from the coding region of the transgene,
[0451] wherein the constitutive exon, alternatively-spliced exon, and flanking intron are each located 5′ to the coding region of the transgene.
   Clause 86. A method of regulating transgene expression using a viral vector comprising a viral genome, the method comprising:
[0452] (a) inserting into the viral genome at least one alternatively-spliced exon cassette, wherein the alternatively-spliced exon cassette comprises an alternatively-spliced exon and at least one flanking intron within the coding region of the transgene; and
[0453] (b) introducing into the alternatively-spliced exon a heterologous, in-frame stop codon at least 50 nucleotides upstream of the next 5′ splice junction, wherein the heterologous, in-frame stop codon elicits nonsense-mediated decay.
   Clause 87. An alternatively-spliced exon cassette comprising, in the 5′ to 3′ direction:
[0454] (i) a nucleotide sequence comprising a first exonic sequence having a 5′ to 3′ orientation, wherein the first exonic sequence comprises a constitutive exon;
[0455] (ii) a nucleotide sequence comprising a first intronic sequence having a 5′ to 3′ orientation, wherein the first intronic sequence comprises at its 5′ end a 5′ splice donor site and at its 3′ end a 3′ splice acceptor site;
[0456] (iii) a nucleotide sequence comprising a second exonic sequence having a 5′ to 3′ orientation, wherein the second exonic sequence comprises an alternatively-spliced exon comprising at its 3′ end a heterologous ATG start codon;
[0457] (iv) a nucleotide sequence comprising a second intronic sequence having a 5′ to 3′ orientation, wherein the second intronic sequence comprises at its 5′ end a 5′ splice donor site and at its 3′ end a 3′ splice acceptor site; and
[0458] (v) a nucleotide sequence comprising a coding region of a transgene having a 5′ to 3′ orientation, wherein the coding region of the transgene comprises at its 5′ end a modification comprising the removal of a native ATG start codon, wherein all native ATG start codons located upstream of the heterologous ATG start codon are mutated or deleted.
   Clause 88. An alternatively-spliced exon cassette comprising, in the 5′ to 3′ direction:
[0459] (i) a nucleotide sequence comprising a first portion of a coding region of a transgene having a 5′ to 3′ orientation;
[0460] (ii) a nucleotide sequence comprising a first intronic sequence having a 5′ to 3′ orientation, wherein the first intronic sequence comprises at its 5′ end a 5′ splice donor site and at its 3′ end a 3′ splice acceptor site;
[0461] (iii) a nucleotide sequence comprising an exonic sequence having a 5′ to 3′ orientation, wherein the exonic sequence comprises an alternatively-spliced exon comprising at its 3′ end a heterologous stop codon;
[0462] (iv) a nucleotide sequence comprising a second intronic sequence having a 5′ to 3′ orientation, wherein the second intronic sequence comprises at its 5′ end a 5′ splice donor site and at its 3′ end a 3′ splice acceptor site; and
[0463] (v) a nucleotide sequence comprising a second portion of the coding region of the transgene having a 5′ to 3′ orientation.
   Clause 89. An alternatively-spliced exon cassette comprising, in the 5′ to 3′ direction:
[0464] (i) a nucleotide sequence comprising a coding region of a transgene having a 5′ to 3′ orientation;
[0465] (ii) a nucleotide sequence comprising a first intronic sequence having a 5′ to 3′ orientation, wherein the first intronic sequence comprises at its 5′ end a 5′ splice donor site and at its 3′ end a 3′ splice acceptor site;
[0466] (iii) a nucleotide sequence comprising a first exonic sequence having a 5′ to 3′ orientation, wherein the first exonic sequence comprises an alternatively-spliced exon comprising a positive or negative cis-acting element;
[0467] (iv) a nucleotide sequence comprising a second intronic sequence having a 5′ to 3′ orientation, wherein the second intronic sequence comprises at its 5′ end a 5′ splice donor site and at its 3′ end a 3′ splice acceptor site; and
[0468] (v) a nucleotide sequence comprising a second exonic sequence having a 5′ to 3′ orientation, wherein the exonic sequence comprises a constitutive exon.
   Clause 90. An alternatively-spliced exon cassette comprising, in the 5′ to 3′ direction:
[0469] (i) a nucleotide sequence comprising a first exonic sequence having a 5′ to 3′ orientation, wherein the first exonic sequence comprises a constitutive exon;
[0470] (ii) a nucleotide sequence comprising a second exonic sequence having a 5′ to 3′ orientation, wherein the second exonic sequence comprises an alternatively-spliced exon comprising at its 3′ end a heterologous ATG start codon; and
[0471] (iii) a nucleotide sequence comprising a coding region of a transgene having a 5′ to 3′ orientation, wherein the coding region of the transgene comprises at its 5′ end a modification comprising the removal of a native ATG start codon, wherein all native ATG start codons located upstream of the heterologous ATG start codon are mutated or deleted.
   Clause 91. An alternatively-spliced exon cassette comprising, in the 5′ to 3′ direction:
[0472] (i) a nucleotide sequence comprising a first portion of a coding region of a transgene having a 5′ to 3′ orientation;
[0473] (ii) a nucleotide sequence comprising a first exonic sequence having a 5′ to 3′ orientation, wherein the first exonic sequence comprises an alternatively-spliced exon comprising at its 3′ end a heterologous stop codon;
[0474] (iii) a nucleotide sequence comprising a second portion of the coding region of the transgene having a 5′ to 3′ orientation;
[0475] (iv) a nucleotide sequence comprising an intronic sequence having a 5′ to 3′ orientation, wherein the intronic sequence comprises at its 5′ end a 5′ splice donor site and at its 3′ end a 3′ splice acceptor site; and
[0476] (v) a nucleotide sequence comprising a second exonic sequence having a 5′ to 3′ orientation, wherein the second exonic sequence comprises a constitutive exon.
   Clause 92. An alternatively-spliced exon cassette comprising, in the 5′ to 3′ direction:
[0477] (i) a nucleotide sequence comprising a coding region of a transgene having a 5′ to 3′ orientation;
[0478] (ii) a nucleotide sequence comprising a first exonic sequence having a 5′ to 3′ orientation, wherein the first exonic sequence comprises an alternatively-spliced exon comprising a positive or negative cis-acting element; and
[0479] (iii) a nucleotide sequence comprising a second exonic sequence having a 5′ to 3′ orientation, wherein the second exonic sequence comprises a constitutive exon.
   Clause 93. An alternatively-spliced exon cassette comprising, in the 5′ to 3′ direction:
[0480] (i) a nucleotide sequence comprising a first exonic sequence having a 5′ to 3′ orientation, wherein the first exonic sequence comprises a constitutive exon;
[0481] (ii) a nucleotide sequence comprising a second exonic sequence having a 5′ to 3′ orientation, wherein the second exonic sequence comprises an alternatively-spliced exon comprising at its 3′ end a heterologous ATG start codon;
[0482] (iii) a nucleotide sequence comprising an intronic sequence having a 5′ to 3′ orientation, wherein the intronic sequence comprises at its 5′ end a 5′ splice donor site and at its 3′ end a 3′ splice acceptor site; and
[0483] (iv) a nucleotide sequence comprising a coding region of a transgene having a 5′ to 3′ orientation, wherein the coding region of the transgene comprises at its 5′ end a modification comprising the removal of a native ATG start codon, wherein all native ATG start codons located upstream of the heterologous ATG start codon are mutated or deleted.
   Clause 94. An alternatively-spliced exon cassette comprising, in the 5′ to 3′ direction:
[0484] (i) a nucleotide sequence comprising a first portion of a coding region of a transgene having a 5′ to 3′ orientation;
[0485] (ii) a nucleotide sequence comprising an exonic sequence having a 5′ to 3′ orientation, wherein the exonic sequence comprises an alternatively-spliced exon comprising at its 3′ end a heterologous stop codon;
[0486] (iii) a nucleotide sequence comprising an intronic sequence having a 5′ to 3′ orientation, wherein the intronic sequence comprises at its 5′ end a 5′ splice donor site and at its 3′ end a 3′ splice acceptor site; and
[0487] (iv) a nucleotide sequence comprising a second portion of the coding region of the transgene having a 5′ to 3′ orientation.
   Clause 95. An alternatively-spliced exon cassette comprising, in the 5′ to 3′ direction:
[0488] (i) a nucleotide sequence comprising a coding region of a transgene having a 5′ to 3′ orientation;
[0489] (ii) a nucleotide sequence comprising a first exonic sequence having a 5′ to 3′ orientation, wherein the exonic sequence comprises an alternatively-spliced exon comprising a positive or negative cis-acting element;
[0490] (iii) a nucleotide sequence comprising an intronic sequence having a 5′ to 3′ orientation, wherein the intronic sequence comprises at its 5′ end a 5′ splice donor site and at its 3′ end a 3′ splice acceptor site; and
[0491] (iv) a nucleotide sequence comprising a second exonic sequence having a 5′ to 3′ orientation, wherein the exonic sequence comprises a constitutive exon.
   Clause 96. An alternatively-spliced exon cassette comprising, in the 5′ to 3′ direction:
[0492] (i) a nucleotide sequence comprising a first exonic sequence having a 5′ to 3′ orientation, wherein the first exonic sequence comprises a constitutive exon;
[0493] (ii) a nucleotide sequence comprising an intronic sequence having a 5′ to 3′ orientation, wherein the intronic sequence comprises at its 5′ end a 5′ splice donor site and at its 3′ end a 3′ splice acceptor site;
[0494] (iii) a nucleotide sequence comprising a second exonic sequence having a 5′ to 3′ orientation, wherein the second exonic sequence comprises an alternatively-spliced exon comprising at its 3′ end a heterologous ATG start codon; and
[0495] (iv) a nucleotide sequence comprising a coding region of a transgene having a 5′ to 3′ orientation, wherein the coding region of the transgene comprises at its 5′ end a modification comprising the removal of a native ATG start codon, wherein all native ATG start codons located upstream of the heterologous ATG start codon are mutated or deleted.
   Clause 97. An alternatively-spliced exon cassette comprising, in the 5′ to 3′ direction:
[0496] (i) a nucleotide sequence comprising a first portion of a coding region of a transgene having a 5′ to 3′ orientation;
[0497] (ii) a nucleotide sequence comprising a first intronic sequence having a 5′ to 3′ orientation, wherein the first intronic sequence comprises at its 5′ end a 5′ splice donor site and at its 3′ end a 3′ splice acceptor site;
[0498] (iii) a nucleotide sequence comprising a first exonic sequence having a 5′ to 3′ orientation, wherein the first exonic sequence comprises an alternatively-spliced exon comprising at its 3′ end a heterologous stop codon;
[0499] (iv) a nucleotide sequence comprising a second portion of the coding region of the transgene having a 5′ to 3′ orientation;
[0500] (v) a nucleotide sequence comprising a second intronic sequence having a 5′ to 3′ orientation, wherein the second intronic sequence comprises at its 5′ end a 5′ splice donor site and at its 3′ end a 3′ splice acceptor site; and
[0501] (vi) a nucleotide sequence comprising a second exonic sequence having a 5′ to 3′ orientation, wherein the second exonic sequence comprises a constitutive exon.
   Clause 98. An alternatively-spliced exon cassette comprising, in the 5′ to 3′ direction:
[0502] (i) a nucleotide sequence comprising a coding region of a transgene having a 5′ to 3′ orientation;
[0503] (ii) a nucleotide sequence comprising an intronic sequence having a 5′ to 3′ orientation, wherein the intronic sequence comprises at its 5′ end a 5′ splice donor site and at its 3′ end a 3′ splice acceptor site;
[0504] (iii) a nucleotide sequence comprising an exonic sequence having a 5′ to 3′ orientation, wherein the exonic sequence comprises an alternatively-spliced exon comprising a positive or negative cis-acting element; and
[0505] (iv) a nucleotide sequence comprising a second exonic sequence having a 5′ to 3′ orientation, wherein the exonic sequence comprises a constitutive exon.
   Clause 99. An alternatively-spliced exon cassette comprising, in the 5′ to 3′ direction:
[0506] (i) a nucleotide sequence comprising a first exonic sequence having a 5′ to 3′ orientation, wherein the first exonic sequence comprises a constitutive exon;
[0507] (ii) a nucleotide sequence comprising a first intronic sequence having a 5′ to 3′ orientation, wherein the first intronic sequence comprises at its 5′ end a 5′ splice donor site and at its 3′ end a 3′ splice acceptor site;
[0508] (iii) a nucleotide sequence comprising a second exonic sequence having a 5′ to 3′ orientation, wherein the second exonic sequence comprises an alternatively-spliced exon comprising at its 3′ end a heterologous ATG start codon;
[0509] (iv) a nucleotide sequence comprising a second intronic sequence having a 5′ to 3′ orientation, wherein the second intronic sequence comprises at its 5′ end a 5′ splice donor site and at its 3′ end a 3′ splice acceptor site;
[0510] (v) a nucleotide sequence comprising a third exonic sequence having a 5′ to 3′ orientation, wherein the third exonic sequence comprises an alternatively-spliced exon;
[0511] (vi) a nucleotide sequence comprising a third intronic sequence having a 5′ to 3′ orientation, wherein the third intronic sequence comprises at its 5′ end a 5′ splice donor site and at its 3′ end a 3′ splice acceptor site; and
[0512] (vii) a nucleotide sequence comprising a coding region of a transgene having a 5′ to 3′ orientation, wherein the coding region of the transgene comprises at its 5′ end a modification comprising the removal of a native ATG start codon,
[0513] wherein all native ATG start codons located upstream of the heterologous ATG start codon are mutated or deleted.
   Clause 100. An alternatively-spliced exon cassette comprising, in the 5′ to 3′ direction:
[0514] (i) a nucleotide sequence comprising a first portion of a coding region of a transgene having a 5′ to 3′ orientation;
[0515] (ii) a nucleotide sequence comprising a first intronic sequence having a 5′ to 3′ orientation, wherein the first intronic sequence comprises at its 5′ end a 5′ splice donor site and at its 3′ end a 3′ splice acceptor site;
[0516] (iii) a nucleotide sequence comprising a first exonic sequence having a 5′ to 3′ orientation, wherein the first exonic sequence comprises an alternatively-spliced exon comprising at its 3′ end a heterologous stop codon;
[0517] (iv) a nucleotide sequence comprising a second intronic sequence having a 5′ to 3′ orientation, wherein the second intronic sequence comprises at its 5′ end a 5′ splice donor site and at its 3′ end a 3′ splice acceptor site;
[0518] (v) a nucleotide sequence comprising a second exonic sequence having a 5′ to 3′ orientation, wherein the second exonic sequence comprises an alternatively-spliced exon;
[0519] (vi) a nucleotide sequence comprising a third intronic sequence having a 5′ to 3′ orientation, wherein the third intronic sequence comprises at its 5′ end a 5′ splice donor site and at its 3′ end a 3′ splice acceptor site (m); and
[0520] (vii) a nucleotide sequence comprising a second portion of the coding region of the transgene having a 5′ to 3′ orientation.
   Clause 101. An alternatively-spliced exon cassette comprising, in the 5′ to 3′ direction:
[0521] (i) a nucleotide sequence comprising a coding region of a transgene having a 5′ to 3′ orientation;
[0522] (ii) a nucleotide sequence comprising a first intronic sequence having a 5′ to 3′ orientation, wherein the first intronic sequence comprises at its 5′ end a 5′ splice donor site and at its 3′ end a 3′ splice acceptor site;
[0523] (iii) a nucleotide sequence comprising a first exonic sequence having a 5′ to 3′ orientation (e), wherein the first exonic sequence comprises a first alternatively-spliced exon comprising a positive or negative cis-acting element;
[0524] (iv) a nucleotide sequence comprising a second intronic sequence having a 5′ to 3′ orientation, wherein the second intronic sequence comprises at its 5′ end a 5′ splice donor site and at its 3′ end a 3′ splice acceptor site;
[0525] (v) a nucleotide sequence comprising a second exonic sequence having a 5′ to 3′ orientation, wherein the second exonic sequence comprises a second alternatively-spliced exon;
[0526] (vi) a nucleotide sequence comprising a third intronic sequence having a 5′ to 3′ orientation, wherein the third intronic sequence comprises at its 5′ end a 5′ splice donor site and at its 3′ end a 3′ splice acceptor site; and
[0527] (vii) a nucleotide sequence comprising a third exonic sequence having a 5′ to 3′ orientation, wherein the third exonic sequence comprises a constitutive exon.
   Clause 102. An alternatively-spliced exon cassette comprising, in the 5′ to 3′ direction:
[0528] (i) a nucleotide sequence comprising a first exonic sequence having a 5′ to 3′ orientation, wherein the first exonic sequence comprises a constitutive exon;
[0529] (ii) a nucleotide sequence comprising a first intronic sequence having a 5′ to 3′ orientation, wherein the first intronic sequence comprises at its 5′ end a 5′ splice donor site and at its 3′ end a 3′ splice acceptor site;
[0530] (iii) a nucleotide sequence comprising a coding region of a transgene having a 5′ to 3′ orientation;
[0531] (iv) a nucleotide sequence comprising a second intronic sequence having a 5′ to 3′ orientation, wherein the second intronic sequence comprises at its 5′ end a 5′ splice donor site and at its 3′ end a 3′ splice acceptor site; and
[0532] (v) a nucleotide sequence comprising a second exonic sequence having a 5′ to 3′ orientation, wherein the second exonic sequence comprises an alternatively-spliced exon.
   Clause 103. An alternatively-spliced exon cassette comprising, in the 5′ to 3′ direction:
[0533] (i) a nucleotide sequence comprising a first portion of a coding region of a transgene having a 5′ to 3′ orientation;
[0534] (ii) a nucleotide sequence comprising a first intronic sequence having a 5′ to 3′ orientation, wherein the first intronic sequence comprises at its 5′ end a 5′ splice donor site and at its 3′ end a 3′ splice acceptor site;
[0535] (iii) a nucleotide sequence comprising a first exonic sequence having a 5′ to 3′ orientation, wherein the first exonic sequence comprises an alternatively-spliced exon comprising at its 3′ end a heterologous stop codon;
[0536] (iv) a nucleotide sequence comprising a second intronic sequence having a 5′ to 3′ orientation, wherein the second intronic sequence comprises at its 5′ end a 5′ splice donor site and at its 3′ end a 3′ splice acceptor site;
[0537] (v) a nucleotide sequence comprising a second exonic sequence having a 5′ to 3′ orientation, wherein the second exonic sequence comprises a constitutive exon;
[0538] (vi) a nucleotide sequence comprising a third intronic sequence having a 5′ to 3′ orientation, wherein the third intronic sequence comprises at its 5′ end a 5′ splice donor site and at its 3′ end a 3′ splice acceptor site; and
[0539] (vii) a nucleotide sequence comprising a second portion of the coding region of the transgene having a 5′ to 3′ orientation.
   Clause 104. An alternatively-spliced exon cassette comprising, in the 5′ to 3′ direction:
[0540] (i) a nucleotide sequence comprising a coding region of a transgene having a 5′ to 3′ orientation;
[0541] (ii) a nucleotide sequence comprising a first intronic sequence having a 5′ to 3′ orientation, wherein the first intronic sequence comprises at its 5′ end a 5′ splice donor site and at its 3′ end a 3′ splice acceptor site;
[0542] (iii) a nucleotide sequence comprising a first exonic sequence having a 5′ to 3′ orientation, wherein the first exonic sequence comprises an alternatively-spliced exon comprising a positive or negative cis-acting element;
[0543] (iv) a nucleotide sequence comprising a second intronic sequence having a 5′ to 3′ orientation, wherein the second intronic sequence comprises at its 5′ end a 5′ splice donor site and at its 3′ end a 3′ splice acceptor site; and
[0544] (v) a nucleotide sequence comprising a second exonic sequence having a 5′ to 3′ orientation, wherein the second exonic sequence comprises a constitutive exon.
   Clause 105. A transgene comprising:
[0545] (i) a constitutive exon and one or more intronic sequences, each from a first gene;
[0546] (ii) an alternatively-spliced exon cassette, wherein the alternatively-spliced exon cassette comprises:
   [0547] (a) an alternatively-spliced exon, and
   [0548] (b) flanking intronic sequences,
   [0549] wherein each of (a) and (b) are from a second gene; and
[0550] (iii) a coding region of interest from a third gene,
[0551] wherein the alternatively-spliced exon comprises an ATG start codon.
   Clause 106. The transgene of clause 105, wherein the first and second gene are the same gene; the first and third gene are the same gene; or all of the first, second, and third genes are the same gene.
   Clause 107. The transgene of clause 105 or clause 106, wherein the first gene is survival motor neuron 1 (SMN1).
   Clause 108. The transgene of any one of clauses 105-107, wherein the constitutive exon comprises exon 6 of SMN1, or a portion thereof.
   Clause 109. The transgene of any one of clauses 105-108, wherein the constitutive exon comprises a polynucleotide having at least 70%, at least 75%, at least 80%, at least 90%, at least 92%, at least 95%, at least 98%, or at least 99% sequence identity, relative to a nucleic acid sequence as set forth in SEQ ID NO: 102.
   Clause 110. The transgene of any one of clauses 105-109, wherein the constitutive exon comprises a polynucleotide having a nucleic acid sequence as set forth in SEQ ID NO: 102.
   Clause 111. The transgene of any one of clauses 105-110, wherein the one or more intronic sequences of (i) are or are derived from intron 6 and/or intron 7 of SMN1.
   Clause 112. The transgene of any one of clauses 105-111, wherein the one or more intronic sequences of (i) comprise(s) a polynucleotide having at least 70%, at least 75%, at least 80%, at least 90%, at least 92%, at least 95%, at least 98%, or at least 99% sequence identity, relative to a nucleic acid sequence as set forth in SEQ ID NO: 103 and/or SEQ ID NO: 104.
   Clause 113. The transgene of any one of clauses 105-112, wherein the one or more intronic sequences of (i) comprise(s) a polynucleotide having a nucleic acid sequence as set forth in SEQ ID NO: 103 and/or SEQ ID NO: 104.
   Clause 114. The transgene of any one of clauses 105-113, wherein the second gene is a gene selected from the group consisting of: CAMK2B, PKP2, LGMN, NRAP, VPS39, KSR1, PDLIM3, BIN1, ARFGAP2, KIF13A, and/or PICALM.
   Clause 115. The transgene of any one of clauses 105-114, wherein the second gene is bridging integrator 1 (BIN1).
   Clause 116. The transgene of any one of clauses 105-115, wherein the alternatively-spliced exon comprises exon 11 of BIN1.
   Clause 117. The transgene of any one of clauses 105-116, wherein the alternatively-spliced exon comprises a polynucleotide having at least 70%, at least 75%, at least 80%, at least 90%, at least 92%, at least 95%, at least 98%, or at least 99% sequence identity, relative to a nucleic acid sequence as set forth in either SEQ ID NO: 37 or SEQ ID NO: 38.
   Clause 118. The transgene of any one of clauses 105-117, wherein the alternatively-spliced exon comprises a polynucleotide having a nucleic acid sequence as set forth in either SEQ ID NO: 37 or SEQ ID NO: 38.
   Clause 119. The transgene of any one of clauses 105-118, wherein the flanking intronic sequences of (ii) are or are derived from intron 10 and/or intron 11 of BIN1.
   Clause 120. The transgene of any one of clauses 105-119, wherein the flanking intronic sequences of (ii) each comprise a polynucleotide having at least 70%, at least 75%, at least 80%, at least 90%, at least 92%, at least 95%, at least 98%, or at least 99% sequence identity, relative to a nucleic acid sequence as set forth in either SEQ ID NO: 15 or SEQ ID NO: 16.
   Clause 121. The transgene of any one of clauses 105-120, wherein the flanking intronic sequences of (ii) each comprise a polynucleotide having a nucleic acid sequence as set forth in either SEQ ID NO: 15 or SEQ ID NO: 16.
   Clause 122. The transgene of any one of clauses 105-121, wherein the alternatively-spliced exon cassette comprises a polynucleotide having at least 70%, at least 75%, at least 80%, at least 90%, at least 92%, at least 95%, at least 98%, or at least 99% sequence identity, relative to a nucleic acid sequence as set forth in any one of SEQ ID NOs: 107-778.
   Clause 123. The transgene of any one of clauses 105-122, wherein the alternatively-spliced exon cassette comprises a polynucleotide having a nucleic acid sequence as set forth in any one of SEQ ID NOs: 107-778.
   Clause 124. The transgene of any one of clauses 105-123, wherein the third gene is myotubularin 1 (MTM1) or calpain 3 (CAPN3).
   Clause 125. The transgene of any one of clauses 105-124, wherein the coding region of interest comprises a polynucleotide having at least 70%, at least 75%, at least 80%, at least 90%, at least 92%, at least 95%, at least 98%, or at least 99% sequence identity, relative to a nucleic acid sequence as set forth in either SEQ ID NO: 1881 or SEQ ID NO: 1882.
   Clause 126. The transgene of any one of clauses 105-125, wherein the coding region of interest comprises a polynucleotide having a nucleic acid sequence as set forth in either SEQ ID NO: 1881 or SEQ ID NO: 1882.
   Clause 127. The transgene of any one of clauses 105-126, wherein, if the wild-type alternatively-spliced exon does not comprise an ATG start codon, the alternatively-spliced exon comprises 1-3 nucleic acid substitutions, relative to the wild-type alternatively-spliced exon, to form the ATG start codon within the alternatively-spliced exon.
   Clause 128. The transgene of clause 127, wherein the ATG start codon is formed in the alternatively-spliced exon by 1 nucleic acid substitution.
   Clause 129. The transgene of clause 127, wherein the ATG start codon is formed in the alternatively-spliced exon by 2 nucleic acid substitutions.
   Clause 130. The transgene of clause 127, wherein the ATG start codon is formed in the alternatively-spliced exon by 3 nucleic acid substitutions.
   Clause 131. The transgene of any one of clauses 105-130, wherein the alternatively-spliced exon is retained in the spliced transcript.
   Clause 132. The transgene of any one of clauses 105-131, wherein all native start codons located 5′ to the ATG start codon located within the alternatively-spliced exon are disrupted or deleted.
   Clause 133. The transgene of any one of clauses 105-132, wherein the alternatively-spliced exon cassette is located 5′, relative to the coding region of interest.
   Clause 134. The transgene of any one of clauses 105-133, wherein the constitutive exon is located 5′, relative to the alternatively-spliced exon cassette.
   Clause 135. The transgene of any one of clauses 105-134, wherein the one or more intronic sequences of (i) flank the alternatively-spliced exon cassette.
   Clause 136. The transgene of any one of clauses 105-135, wherein the alternatively-spliced exon comprises a heterologous, in-frame stop codon.
   Clause 137. The transgene of clause 136, wherein the heterologous, in-frame stop codon is at least 50 nucleotides upstream of the next 5′ splice junction.
   Clause 138. The transgene of clause 136, wherein the heterologous, in-frame stop codon elicits nonsense-mediated decay.
   Clause 139. The transgene of any one of clauses 105-138, wherein the alternatively-spliced exon is retained in the spliced transcript in distinct tissues.
   Clause 140. The transgene of clause 139, wherein the alternatively-spliced exon is retained in the spliced transcript in skeletal muscle and/or wherein the alternatively-spliced exon is not retained in the spliced transcript in heart and/or liver tissue.
   Clause 141. The transgene of any one of clauses 105-140, wherein the flanking intronic sequences of (ii)(b) are or are derived from native flanking introns of the alternatively-spliced exon.
   Clause 142. The transgene of any one of clauses 105-141, wherein the flanking intronic sequences of (ii)(b) each comprise at least one modification, relative to a naturally occurring intronic sequence.
   Clause 143. The transgene of clause 142, wherein the modification is a substitution or deletion of one or more nucleic acids.
   Clause 145. The transgene of any one of clauses 105-143, wherein the ATG start codon is located at the 3′ end of the alternatively-spliced exon.
   Clause 145. The transgene of clause 144, wherein, if the wild-type alternatively-spliced exon does not comprise an ATG start codon at its 3′ end, the first 10 nucleotides of the flanking intronic sequence which is immediately 3′ to the alternatively-spliced exon comprise 1-5 nucleotide substitutions, relative to the wild-type flanking intronic sequence which is immediately 3′ to the wild-type alternatively-spliced exon.
   Clause 146. The transgene of any one of clauses 105-145, wherein the one or more intronic sequences of (i) each comprise at least one modification, relative to a naturally occurring intronic sequence.
   Clause 147. The transgene of clause 146, wherein the modification is a substitution or deletion of one or more nucleic acids.
   Clause 148. The transgene of any one of clauses 105-147, wherein the coding region of interest comprises at least one modification, relative to a naturally occurring coding region of the third gene.
   Clause 149. The transgene of clause 148, wherein the modification is a substitution or deletion of one or more nucleic acids.
   Clause 150. The transgene of clause 148, wherein the coding region of interest comprises a deletion or disruption of a native start codon.
   Clause 151. The transgene of clause 148, wherein the coding region of interest comprises at least one heterologous stop codon.
   Clause 152. The transgene of clause 151, wherein the at least one heterologous stop codon is at least 50 nucleotides upstream of the next 5′ splice junction.
   Clause 153. The transgene of clause 151, wherein the at least one heterologous stop codon elicits nonsense-mediated decay.
   Clause 154. The transgene of any one of clauses 105-153, further comprising a 3′ untranslated region (UTR).
   Clause 155. The transgene of clause 154, wherein the 3′ UTR comprises a polyadenylation (pA) site and a cleavage site.
   Clause 156. The transgene of clause 155, wherein the polyadenylation site is an SV40 pA site.
   Clause 157. The transgene of any one of clauses 105-156, further comprising a promoter,
[0552] wherein the promoter is located 5′, relative to all of (i), (ii), and (iii).
   Clause 158. The transgene of clause 157, wherein the promoter is a tissue-specific promoter.
   Clause 159. The transgene of clause 158, wherein the tissue-specific promoter is an MHCK7 promoter.
   Clause 160. The transgene of any one of clauses 105-159, wherein the alternatively-spliced exon cassette comprises a nucleic acid sequence which is 450 to 650 nucleotides in length.
   Clause 161. A recombinant viral genome comprising the transgene of any one of clauses 105-160.
   Clause 162. The recombinant viral genome of clause 161, wherein the recombinant viral genome is a genome from a recombinant adeno-associated virus (rAAV).
   Clause 163. The recombinant viral genome of clause 162, wherein the transgene is flanked by AAV inverted terminal repeat (ITR) sequences.
   Clause 164. The recombinant viral genome of clause 163, wherein the AAV ITR sequences are AAV2 ITR sequences.
   Clause 165. The recombinant viral genome of any one of clauses 161-164, wherein the recombinant viral genome comprises a polynucleotide having at least 70%, at least 75%, at least 80%, at least 90%, at least 92%, at least 95%, at least 98%, or at least 99% sequence identity, relative to a nucleic acid sequence as set forth in either SEQ ID NO: 105 or SEQ ID NO: 106.
   Clause 166. The recombinant viral genome of any one of clauses 161-165, wherein the recombinant viral genome comprises a polynucleotide having a nucleic acid sequence as set forth in either SEQ ID NO: 105 or SEQ ID NO: 106.
   Clause 167. An rAAV particle comprising a recombinant viral genome according to any one of clauses 161-166.
   Clause 168. The rAAV particle of clause 167, wherein the rAAV particle comprises AAV serotype 1, 2, 3, 4, 5, 6, 7, 8, 9, or 10, or AAV derivative or pseudotype AAV2-AAV3 hybrid, AAVrh.10, AAVhu.14, AAV3a/3b, AAVrh32.33, AAV-HSC15, AAV-HSC17, AAVhu.37, AAVrh.8, CHt-P6, AAV2.5, AAV6.2, AAV2i8, AAV-HSC15/17, AAVM41, AAV9.45, AAV6(Y445F/Y731F), AAV2.5T, AAV-HAE1/2, AAV clone 32/83, AAV5hH10, AAV2 (Y→F), AAV8 (Y733F), AAV2.15, AAV2.4, AAVM41, and AAVr3.45.
   Clause 169. The rAAV particle of clause 167 or clause 168, further comprising at least one helper plasmid.
   Clause 170. The rAAV particle of clause 169, wherein the helper plasmid comprises a rep gene and a cap gene.
   Clause 171. The rAAV particle of clause 170, wherein the rep gene encodes Rep78, Rep68, Rep52, or Rep40, and/or wherein the cap gene encodes a VP1, VP2, and/or VP3 region of the viral capsid protein.
   Clause 172. The rAAV particle of clause 169, wherein the rAAV particle comprises two helper plasmids.
   Clause 173. The rAAV particle of clause 172, wherein the first helper plasmid comprises a rep gene and a cap gene and the second helper plasmid comprises a E1a gene, a E1b gene, a E4 gene, a E2a gene, and a VA gene.
   Clause 174. A recombinant viral genome comprising a transgene, wherein the transgene comprises:
[0553] (i) a constitutive exon and one or more intronic sequences;
[0554] (ii) an alternative exon cassette comprising:
   [0555] (a) an alternatively-spliced exon;
   [0556] (b) at least a portion of the intron immediately upstream of the alternatively-spliced exon; and
   [0557] (c) at least a portion of the intron immediately downstream of the alternatively-spliced exon,
   [0558] wherein, if the wild-type alternatively-spliced exon does not comprise an ATG start codon at its 3′ end:
      [0559] (1) the 3′ end of the alternatively-spliced exon comprises 1-3 nucleic acid substitutions relative to the wild-type alternatively-spliced exon to form an ATG start codon, and
      [0560] (2) the first 10 nucleotides of the intron immediately downstream of the alternatively-spliced exon comprise 1-5 nucleic acid substitutions relative to the wild-type intron immediately downstream of the wild-type alternatively-spliced exon; and
[0561] (iii) a coding region of interest.
   Clause 175. The recombinant viral genome of clause 174, wherein the 1-5 nucleic acid substitutions of (2) increase splice site strength.
   Clause 176. The recombinant viral genome of clause 174 or clause 175, wherein any wild-type start codons within the alternatively-spliced exon located upstream of the ATG start codon at the 3′ end of the alternatively-spliced exon are disrupted or deleted.
   Clause 177. The recombinant viral genome of any one of clauses 174-176, further comprising a tissue-specific promoter upstream of the alternative exon cassette.
   Clause 178. The recombinant viral genome of any one of clauses 174-177, wherein the coding region of interest is or is derived from a naturally occurring coding region of MTM1 or CAPN3.
   Clause 179. The recombinant viral genome of any one of clauses 174-178, wherein the tissue-specific promoter is an MHCK7 promoter.
   Clause 180. The recombinant viral genome of any one of clauses 174-179, wherein the alternative exon is exon 11 of the BIN1 gene.
   Clause 181. The recombinant viral genome of any one of clauses 174-180, wherein the constitutive exon is exon 6 of the SMN1 gene.
   Clause 182. The recombinant viral genome of any one of clauses 174-181, wherein the alternative exon cassette promotes skeletal muscle expression of the coding region of interest and reduces cardiac muscle expression of the coding region of interest.
   Clause 183. The recombinant viral genome of any one of clauses 174-182, wherein the alternative exon cassette is approximately 600 nucleotides in length.
   Clause 184. A method of treating a disease or condition in a subject comprising administering a recombinant viral genome according to any one of clauses 163-166 or 174-183, or an rAAV particle according to any one of clauses 167-173, to the subject.
   Clause 185. The method of clause 184, wherein the subject is a mammal.
   Clause 186. The method of clause 185, wherein the mammal is a human.
   Clause 187. The method of any one of clauses 184-186, wherein the recombinant viral genome or rAAV particle is administered to the subject at least one time.
   Clause 188. The method of clause 187, wherein the viral genome or rAAV particle is administered to the subject 2, 3, 4, 5, 6, 7, 8, 9, or 10 times.
   Clause 189. The method of any one of clauses 184-188, wherein the viral genome or rAAV particle is administered to the subject parenterally, subcutaneously, intraocularly, intravitreally, subretinally, intravenously (IV), intracerebro-ventricularly, intramuscularly, intrathecally (IT), intracisternally, intraperitoneally, enterally, via inhalation, topically, or by direct injection to one or more cells, tissues, or organs.
   Clause 190. The method of any one of clauses 184-189, wherein the viral genome or viral particle is administered to the subject by intravenous injection, intramuscular injection, intrathecal injection, or intravitreal injection.
   Clause 191. The method of any one of clauses 184-190, wherein the disease or condition is a disease or condition selected from the group consisting of Dentatorubral-pallido-luysian atrophy (DRPLA), myotonic dystrophy type 1 (DM1), myotonic dystrophy type 2 (DM2), Fragile X syndrome of mental retardation (FMR1), Fragile X tremor ataxia syndrome (FXTAS), FRAXE mental retardation (FMR2), Friedreichs ataxia (FRDA), Huntington disease (HD), Huntington disease-like 2 (HDL2), Oculopharyngeal muscular dystrophy (OPMD), Myoclonic epilepsy type 1, Alzheimer's disease, ALS/FTD, spinocerebellar ataxia type 1 (SCA1), spinocerebellar ataxia type 2 (SCA2), spinocerebellar ataxia type 3 (SCA3), spinocerebellar ataxia type 6 (SCA6), spinocerebellar ataxia type 7 (SCAT), spinocerebellar ataxia type 8 (SCA8), spinocerebellar ataxia type 10 (SCA10), spinocerebellar ataxia type 12 (SCA12), spinocerebellar ataxia type 17 (SCA17), Syndromic/non-syndromic X-linked mental retardation, Emery-Dreifuss muscular dystrophy type 2, familial partial lipodystrophy, limb girdle muscular dystrophy type 1B, dilated cardiomyopathy, familial partial lipodystrophy, Charcot-Marie-Tooth disorder type 2B1, mandibuloacral dysplasia, childhood progeria syndrome (Hutchinson-Gilford syndrome), Werner syndrome, Dilated cardiomyopathy (DCM), Hypertrophic cardiomyopathy (HCM), Restrictive cardiomyopathy (RCM), Left Ventricular Non-compaction (LVNC), Arrhythmogenic Right Ventricular Dysplasia (ARVD), takotsubo cardiomyopathy, Duchenne muscular dystrophy, Becker muscular dystrophy, Limb-girdle muscular dystrophy, Facioscapulohumeral muscular dystrophy, Congenital muscular dystrophy, Oculopharyngeal muscular dystrophy, Distal muscular dystrophy, Emery-Dreifuss muscular dystrophy, dementia, Parkinson's disease (PD), a PD-related disorder, Prion disease, a motor neuron disease (MND), Progressive bulbar palsy (PBP), Progressive muscular atrophy (PMA), Primary lateral sclerosis (PLS), Spinal muscular atrophy (SMA), a bladder cancer, a breast cancer, a colorectal cancer, a kidney cancer, a lung cancer, a lymphoma, a melanoma, an oral cancer, an ovarian cancer, an oropharyngeal cancer, a pancreatic cancer, a prostate cancer, a thyroid cancer, a uterine cancer, Down syndrome, Prader-Willi Syndrome (PWS), Bloom Syndrome, Cockayne Syndrome Type I-216400, Cockayne Syndrome Type III, Cockayne Syndrome Type I, Hutchinson-Gilford Progeria Syndrome, Mandibuloacral Dysplasia with Type A Lipodystrophy, Progeria, Adult Onset Progeroid Syndrome, Neonatal Rothmund-Thomson Syndrome, Seip Syndrome, Werner Syndrome, Replication Focus-Forming Activity 1, myotubular myopathy, Danon Disease, and/or centronuclear myopathy.
   Clause 192. The transgene of any one of clauses 105-160, wherein the ATG start codon is in the same reading frame as the coding region of interest.
   Clause 193. The transgene of any one of clauses 105-160, wherein the ATG start codon is within up to 5, 10, 20, or 30 nucleotides upstream of the 3′ end of the alternative-spliced exon.
   Clause 194. The transgene of any one of clauses 105-160, wherein the ATG start codon is within up to 5, 10, 20, or 30 nucleotides upstream of the 3′ end of the alternative-spliced exon and is in the same reading frame as the coding region of interest.

[0562] These and other aspects of the application are illustrated by the following non-limiting examples.

### Examples

[0563] Virally-mediated gene therapies that seek to deliver a protein cargo commonly package a coding region of interest along with a 5′ untranslated region, 3′ untranslated region, a promoter that will drive the gene of interest, and, sometimes, a constitutive intron to enhance nuclear export and RNA stability. However, almost all multi-exonic human genes in the human genome (>95%) are alternatively spliced such that multiple isoforms are generated from a single gene locus. These isoforms may exhibit distinct functions or expression patterns in different cellular conditions. Therefore, they comprise an important aspect of gene regulation and allow multiple species to be generated from a single locus.

[0564] There are many descriptions of tissue-specific exons in the literature; these types of data have been derived from microarray or RNAseq analyses of human tissues, or other conditions in which a perturbation is made and the transcriptome is profiled. The inclusion level of an exon is commonly described by “percent spliced in” (psi) and describes the percentage of mRNAs transcribed from a locus that are spliced to contain an alternatively-spliced exon of interest. For example, an exon that has a psi of 10% in a given tissue is included in the mature mRNA 10% of the time. Some examples of tissue-specific or tissue-biased exons include TPM1 exon 2 (<5% psi in heart but >95% psi in colon), or SLC25A3 exon 3 (>90% in heart but <5% in brain). Exons with a strong shift in psi between tissues are sometimes referred to as “switch-like” exons. Switchlike exons tend to exhibit greater phylogenetic conservation in their proximal introns, as compared to constitutively spliced exons or alternatively-spliced exons that do not exhibit switch-like behavior.

[0565] To date, tissue-specific alternative splicing regulation has not been used to control virally-mediated gene therapies, and there has been no straightforward method for how to do so. Described here are specific sequences that may confer tissue-specific regulation for virally-mediated gene therapies (e.g., AAV; lentivirus). In some embodiments, the virus is an adeno-associated virus (AAV). In embodiments where the virus is an AAV, the orientation of the cargo is invariant. This is because the AAV ITRs are symmetric. In some embodiments, the virus is a lentivirus. In embodiments, where the virus is a lentivirus, a cargo with spliced introns must be placed on the minus strand. This is because lentivirus packaging undergoes an RNA intermediate, and the introns must not be lost. Examples 1-6 describe an AAV-mediated gene therapy, however it should be understood that either an AAV or a lentivirus may be utilized according the methods described in the Examples.

### A. Example 1: Regulation of AAV Cargo Using Skipped Exon Trio

[0566] Alternatively-spliced exons and their flanking introns can be incorporated into AAV cargoes by at least two distinct methods to confer similar tissue-specific behavior. Both approaches utilize a skipped exon “trio” where there are two flanking constitutive exons and the middle exon is alternative.

[0567] In the first approach, the exon trio is placed at the start of the AAV cargo and an ATG or part of an ATG translation start codon is introduced at the end of the middle (alternative) exon. The downstream (constitutive) exon is omitted, but the transgene cargo of interest sans ATG is inserted in its place, such that inclusion of the alternatively-spliced exon results in joining of the ATG from the alternatively-spliced exon with the rest of the transgene of interest upon splicing. ATGs that lie upstream of the intended start codon are mutated or removed. Thus, this results in translation of the transgene only in settings that include the alternatively-spliced exon.

[0568] In the second approach, the alternatively-spliced exon and flanking introns are placed within the coding region of the AAV cargo. A stop codon is introduced within the alternatively-spliced exon such that it follows nonsense-mediated decay (NMD) rules, and thus elicits NMD when included. This results in productive translation of the transgene only in settings that exclude the alternatively-spliced exon. If the exon is too short to elicit NMD, another constitutive intron can be placed downstream in the transgene such that NMD rules (e.g., the stop codon should be >50 nucleotides from the next splice junction) are satisfied.

[0569] These two approaches may be applied not only to tissue-specific exons, but also exons that respond to different cellular states or conditions. For example, it may be desirable to confer regulatory behavior that occurs in:
[0570] (1) distinct tissues or cell types;
[0571] (2) activated T-cells, or states of inflammation;
[0572] (3) cells in which the transgene is highly expressed; and/or
[0573] (4) cells that exhibit severe disease.

[0574] The general approach described herein is advantageous over protein-based regulatory strategies because no additional protein components are necessary to confer regulation; all regulation occurs using endogenous machinery, and no neo-antigens are generated that could be immunogenic. All of the regulation occurs at the RNA level.

[0575] In some embodiments, the virus is an adeno-associated virus (AAV). In embodiments where the virus is an AAV, the orientation of the cargo is invariant. This is because the AAV ITRs are symmetric. In some embodiments, the virus is a lentivirus. In embodiments, where the virus is a lentivirus, a cargo with spliced introns must be placed on the minus strand. This is because lentivirus packaging undergoes an RNA intermediate, and the introns must not be lost.

### B. Example 2: Regulated Expression of AAV Cargo in Muscle Versus Heart Tissue

[0576] Commonly used methods to regulate tissue-specific expression include tissue-specific promoters and microRNAs. However, these methods are not quite specific enough to provide the level of control needed for certain therapeutic interventions. In contrast, there are exons that show close to 0% psi in heart but >90% psi in skeletal muscle. A regulatory cassette is generated using alternatively-spliced exons that allows an AAV transgene cargo to be expressed in skeletal muscle, but not in the heart. The exons shown in Table 1 will be tested to evaluate differential expression in skeletal versus heart tissue. These exons are good candidates for this type of tissue-specific behavior because they show robust switch-like behavior between heart and muscle. Some of the exons shown in Table 1 are conserved between mouse and human, and, correspondingly, the switch-like behavior is conserved across species. In some embodiments, the intronic sequences that flank the exons shown in Table 1 are also included as part of the regulatory cassette.

[0577] These exons were chosen because of their switch-like behavior between heart and muscle, and because they are all <250 nucleotides in length, with reasonably conserved intronic sequences that flank the exons. Additionally, these exons are all amenable to being cloned out of their endogenous context and placed into a minigene to act as regulatory cassettes to control AAV cargo expression. It is expected that incorporation of these exons into an AAV-delivered transgene will enable production of a protein cargo in the skeletal muscle and will result in decreased production of that cargo in the heart.

TABLE 1
Candidate exons compiled from heart and skeletal muscle RNAseq data.

| | | | | | Altered | |
|---|---|---|---|---|---|---|
| | | | | | Sequence | |
| | | | | | to remove | Full |
| | | | | | upstream ATGs | sequence |
| | Coordi- | Sequence of | Endogenous | Sequence of | and add ATG | in |
| | nates | truncated | Sequence | truncated | or part of ATG | AAV |
| Gene | (hg19) | upstream intron | of Exon | downstream intron | at end of exon | context |
| CAMK2B | chr7: | CTGTTACTTTTGCTGTGAT | TGGGCAGACAGACCACC | GTAGgTGTGTCTCGACCA | TGGGCAGACAGACCA | (SEQ |
| | 44279188: | GCTGTAATGCCGGGAACGC | GCTCCGGCCACAATGTC | GCGTCCCGCCCGCTCCCG | CCGCTCCGGCCACAA | ID NO: |
| | 44279262 | GTGCACACGGTCACACCAA | CACCGCGGCCTCCGGCA | CCCGTCCCTCCTGCCAGC | GTCCACCGCGGCCTC | 45) |
| | | CACTAATAGGACTGTCCTG | CCACCATGGGGCTGGTG | ATGCAGCCCCCTGCTGCA | CGGCACCACCAGGGG | |
| | | TCTGCTGTGTGCTCACCAC | GAACAAG (SEQ ID | CGCAGCCGCT (SEQ ID | CTGGTGGAACAAtG | |
| | | ACCCTTTGGGCATGAGAAG | NO: 23) | NO: 2) | (SEQ ID NO: 24) | |
| | | CCCCCACTGGGGTTTTCTA | 5′ splice site of | | | |
| | | AGGAGAAAGGAGGCAAATG | alternatively- | | | |
| | | CTTTTCCGTGTCAATCAGT | spliced exon | | | |
| | | CCAATCTTGTTTTCACTCT | was modified to | | | |
| | | CTTGAGCAAAGGATTCTGG | ATG\|GTAGGT | | | |
| | | AACCATCTGTCACCTAAAC | | | | |
| | | TTTAACTCTAATCTTCTTC | | | | |
| | | TGCTTCCTTTGTCTCTTTT | | | | |
| | | CTTCCCTTACCTCGCCCAC | | | | |
| | | CCCTCGTCTGTGTCCGCCC | | | | |
| | | ACCCCTCCCTTCCCCTCGT | | | | |
| | | CTCTAACCCGGTGCTAACA | | | | |
| | | G (SEQ ID NO: 1) | | | | |
| PKP2 | chr12: | GGAAAATTCCACTCCCTTT | ACCATACAGTCAATTTA | GTGAGACCCCTGTCTCTA | ACCATACAGTCAATT | (SEQ |
| | 32996116: | GTTCCAATTAATCCTCTCT | AGAAGTAGGAATGGCTG | CTCAAAATACAAAAAAAT | TAAGAAGTAGGAAGG | ID NO: |
| | 32996247 | GGTTTTTATTGTAAGGTGT | GCCGGGCGCGGTGGCTC | TAGCCG (SEQ ID NO: | CTGGCCGGGCGCGGT | 46) |
| | | ACTTTTTCTTTGAGTGTCC | ACGCCTGTAATCCCAGC | 4) | GGCTCACGCCTGTAA | |
| | | TGTGTGGTCCTTTTTAAAA | ACTTTGGGAGGCCAAGG | | TCCCAGCACTTTGGG | |
| | | GGAGGAAATGTCATTATGC | CGGGCGGATCACGAGGT | | AGGCCAAGGCGGGCG | |
| | | TTCACATTCTTAAGCTTCT | CAGGAGTTCGAGACCAG | | GATCACGAGGTCAGG | |
| | | GGCAGGCAGAGACTATTAA | CCTGACCAACATG | | AGTTCGAGACCAGCC | |
| | | TTTGTTTGCTTATTTAGGA | (SEQ ID NO: 25) | | TGACCAACATG | |
| | | CTAAAGAAGCTTTTGTTTT | | | (SEQ ID NO: 26) | |
| | | TTTTCTTCATTTCTCTCTT | | | | |
| | | CTTTCTAACTTGCTTTTGT | | | | |
| | | AGCTTAGTAACCAAAACTC | | | | |
| | | AGCCTCAGACTTGTCTTTA | | | | |
| | | AATTGTTTTCAACCACCTT | | | | |
| | | CTGTGCCCTGAGTACCTAT | | | | |
| | | GCTTCCTCTTTCCTTTGTA | | | | |
| | | CAG (SEQ ID NO: 3) | | | | |
| LGMN | chr14: | CCTGGATGTGAACTTGACT | GGTCTTACTCTGTTGCC | GTaTGTGCCACCATACTT | GGTCTTACTCTGTTG | (SEQ |
| | 93207407: | CTGCTACTTAGATGGCCCT | CAGGCTGGAGTGCAGTG | GGCTAATTTTTGTATTTT | CCCAGGCTGGAGTGC | ID NO: |
| | 93207524 | GTGAACTTGACCTTATTAC | GCACAATCTTGGCTCAC | TAGTAGAGATGGGGTTTC | AGTGGCACAATCTTG | 47) |
| | | TTGCATTGTTGGTGATAAT | TGCAACCTCTGCCTCCC | ACCATGTTGGCCAGGCTG | GCTCACTGCAACCTC | |
| | | TTATCTGGAATGGGCACTG | GGGTTCAAGCAATTCTC | GTCTCGAACTCCTGGCGT | TGCCTCCCGGGTTCA | |
| | | CATCCCAAACTTCTCAAAT | CTGCCTCAGCCTCCCGA | CAAGTGATCAACCCGTCT | AGCAATTCTCCTGCC | |
| | | GGATTAAACCTGACTTGAT | GTAGCTGGGATTACAG | CGGCCTCCCAAAATGCTG | TCAGCCTCCCGAGTA | |
| | | GGTACATTTCTTGGATCCA | (SEQ ID NO: 27) | GGATTACAGGCATGAGCC | GCTGGGATTACAtG | |
| | | AGTGAAGTCttttttttCT | 5′ splice site of | ACTGCACCCGGCCCCAAG | (SEQ ID NO: 28) | |
| | | TTTCTTGACAG (SEQ ID | alternatively- | TGAAGTCTTTTAAGTGAA | | |
| | | NO: 5) | spliced exon | TTACTGACCTGGTA | | |
| | | | was modified to | (SEQ ID NO: 6) | | |
| | | | ATG\|GTATGT | | | |
| NRAP | chr10: | ACCAGTTTTGCCATTTTTT | GTGGAGTATAAGAAGGA | GTGAGTTGTTAACGCTAA | GTGGAGTATAAGAAG | (SEQ |
| | 115402693: | GAGTTATGAAATCTTATAT | TCTGGAAAGTAGTAGAG | GCTTTTGTTTGGGCACTG | GATCTGGAAAGTAGT | ID NO: |
| | 115402797 | TATTTGTTCTTGAAAGCGA | GTCACAGTATCAACTAC | TTGGTGAGCTTAGTCTTT | AGAGGTCACAGTATC | 48) |
| | | CTATATGCTTTTAATTTTC | TGTGAAACACCTCAATT | AGGICTCCTAAGAGGGAC | AACTACTGTGAAACA | |
| | | TGAATGAAACCAATTATTT | CAGGAACGTGAGCAAGA | AGTCTATGGGAATGGATC | CCTCAATTCAGGAAC | |
| | | GCTATTTATTATGATTCAT | TCTCAAAATTTACCAGT | TATGTGTCTTGGAGAAGC | GTGAGCAAGATCTCA | |
| | | TTTTATAAAGGAAAATATG | GAT (SEQ ID NO: | ATGGCCTT (SEQ ID | AAATTTACCAGTGAT | |
| | | TCCTGCTAACTTAGCATAT | 29) | NO: 8) | (SEQ ID NO: 30) | |
| | | TCTATGCTTGATATGTTAA | | | | |
| | | AATCTTGGGTTGAAAGTTT | | | | |
| | | TCTAAAAATATCCTAGTCA | | | | |
| | | AGTCCTGGGACATTTTCAA | | | | |
| | | GAGTGACTTCGGATTTGGT | | | | |
| | | TCTATTGTGTGTCTGGTGT | | | | |
| | | TTTGATTTCCAAG (SEQ | | | | |
| | | ID NO: 7) | | | | |
| VPS39 | chr15: | TTTTTAAACCCCGAACCCA | TGCCAGCAGATGTAGCA | GTAAGTGTAGACGCATTG | TGCCAGCAGtTGTAG | (SEQ |
| | 42484264: | GTATGTAGTTATTGCTTCA | TCACCTGAAAGCGGCA | AATTGCTTTAGCTCTGGA | CATCACCTGAAAGCG | ID NO: |
| | 42484296 | TGATAGCTGCTCTGATGAT | (SEQ ID NO: 31) | GATGGGTTTGAGTGTTTG | GCA (SEQ ID NO: | 49) |
| | | GATGATGATAATTATTCTC | | CTCTGTCTCCGTGATACA | 32) | |
| | | TTTTTGACTCATTGGTGAC | | GAACTTAGTTAGAATAGT | | |
| | | TTTTGAGGCTGAATATTTT | | TGCTGGAAATTAGTTGGT | | |
| | | TGTCATCCCCAGCAAGGCT | | CTAGATCTAAGGATGCTT | | |
| | | GAATTCACATGTTTTTATG | | TGGGCTGGGTTTCATGGC | | |
| | | GTATATAACTTTCTTCCCC | | TTGGGCTCTTATATTTGA | | |
| | | TTTTTTGTAACAG (SEQ | | CTGTTACTTTTTACACCC | | |
| | | ID NO: 9) | | TTCCTTGTGGAACACTTT | | |
| | | | | GCCAAGGTACTGATTTTG | | |
| | | | | CAAGATAAGATCTTCAGA | | |
| | | | | CTCACGAGTACCTTGCCG | | |
| | | | | CTTCAGTGAACTTTGTGT | | |
| | | | | GATCCTTTCTGCT | | |
| | | | | (SEQ ID NO: 10) | | |
| KSR1 | chr17: | TCTTTTCCTCCTTCCTGCA | CTGCCTACTTCATTCAT | GTGAGTCCTTTGCATGGT | CTGCCTACTTCATTC | (SEQ |
| | 25928386: | TGGTTTGGCCTGTCCTTGC | CATAGACAGCAGTTTAT | TCCATTAACTGCCCTTTG | ATCATAGACAGCAGT | ID NO: |
| | 25928427 | CAGGTCCATCTGGGGTAGG | CTTTCCAG (SEQ ID | CTGTGACCCCTTCTGTCC | TTATCTTTCCAtG | 50) |
| | | GCTGTCCCAGCCCAGTAAC | NO: 33) | TGCCCACCTGGGCAGGGC | (SEQ ID NO: 34) | |
| | | AAGTCCCTGCCTCCCAAGC | | GCCCTCTCTCTGGGTACC | | |
| | | CGGTACCTGCAATTCCGCT | | TTTGGAGATACTTGAGTC | | |
| | | CCTCCCTCCTGCGTTGGCC | | TCCCTCCACCTGTTCTGA | | |
| | | GTTCTGTGTGTGTGACTCA | | GAGCTGACTGCCCATAGA | | |
| | | CCTCCTCTTCTGTTTAAAG | | GGATGGGAAGAGGGCAGG | | |
| | | (SEQ ID NO: 11) | | GCAAGTGCCCTGGTGGTA | | |
| | | | | GGCCTCTTACGTGAGAAG | | |
| | | | | TTCTTGCTGGGAGGGACC | | |
| | | | | CTGGAATCCATCCCATCC | | |
| | | | | AGCCTCTTGGCACAGAGA | | |
| | | | | CTGCAGGCAACCTTTTCA | | |
| | | | | AGGTCACACTGCTAG | | |
| | | | | (SEQ ID NO: 12) | | |
| PDLIM3 | chr4: | AAATCAAGATTTGGGATGT | TGGATGCAGCACTCCCT | GTAAgATGAGTCTCTTTG | TGGATtGCAGCACTC | (SEQ |
| | 186429453: | AATTCACCTCTCACTTTTG | CCGGGATTGACTGTGGC | AACCATGGGCATATTAAC | CCTCCGGGATTGACT | ID NO: |
| | 186429716 | TCTTCAATTCCTTTTAACC | AGTGGACGCAGCACCCC | TAAACACGTGGGCAATGT | GTGGCAGTGGACGCA | 51) |
| | | TCTCTGTACGTGTTCTCTG | TTCTTCTGTCAGTACTG | CAGCTTTACTGGTGTCTT | GCACCCCTTCTTCTG | |
| | | TGTTCTTCTGTCTGGACTG | TTAGTACCATTTGCCCA | TTAACATTGTCTT | TCAGTACTGTTAGTA | |
| | | TCTGGCTCCCGGTGCCATC | GGTGACTTGAAAGTTGC | (SEQ ID NO: 14) | CCATTTGCCCAGGTG | |
| | | TCTGTGTAACGTGTATCCA | GGCTAAGCTGGCCCCTA | | ACTTGAAAGTTGCGG | |
| | | TTAACACAG (SEQ ID | ACATTCCTTTGGAAATG | | CTAAGCTGGCCCCTA | |
| | | NO: 13) | GAACTTCCTGGTGTGAA | | ACATTCCTTTGGAAG | |
| | | | GATTGTACATGCTCAGT | | GAACTTCCTGGTGTG | |
| | | | TTAATACACCTATGCAG | | AAGATTGTACTGCTC | |
| | | | TTGTACTCAGATGACAA | | AGTTTAATACACCTT | |
| | | | TATTATGGAAACACTCC | | GCAGTTGTACTCAGT | |
| | | | AGGGTCAGGTTTCAACA | | GACAATATTgTGGAA | |
| | | | GCCCTAGGGGAAACACC | | ACACTCCAGGGTCAG | |
| | | | TTTGATGAG (SEQ ID | | GTTTCAACAGCCCTA | |
| | | | NO: 35) | | GGGGAAACACCTTTG | |
| | | | 5′ splice site of | | cTGAtG (SEQ ID | |
| | | | alternatively- | | NO: 36) | |
| | | | spliced exon | | | |
| | | | was modified to | | | |
| | | | ATG\|GTAAGA | | | |
| BIN1 | chr2: | GAGCCTCCTGCCCCTCACC | AAAGAAAAGTAAACTGT | GTACgtGCAGTGAGTGCT | AAAGAAAAGTAAACT | (SEQ |
| | 127818172: | AGGCCCTGTTAGCATCACC | TTTCGCGGCTGCGCAGA | GCGGAGGGGCGCAGAGGC | GTTTTCGCGGCTGCG | ID NO: |
| | 127818216 | TCGGGCACCTGGCCACAGC | AAGAAGAACAG (SEQ | CCGCGCCCTGGCTGGCCC | CAGAAAGAAGAACAt | 52) |
| | | AGGGGCCAGTCAGGGCACC | ID NO: 37) | TGTGCATGCGCCTTGCGC | G (SEQ ID NO: | |
| | | CCGGGATAGCACGCCCAGG | 5′ splice site of | CCTGCTCCCAGGTGCCAC | 38) | |
| | | CCCTGTGCAAGGCCTCTGG | alternatively- | TAACCCGTAATCTGGCTC | | |
| | | CACTTAGGAGAGGCTTTTG | spliced exon | TGTGTGCAGTGCTGCCCG | | |
| | | CCCCTTTGTCCTCTGAGCA | was modified to | GCAGGGCTGTCGTGTGCG | | |
| | | GAAGGGTTGGCAAAGAGGG | ATG\|GTACGT | TGTTGGGTGGGAAGGCGG | | |
| | | AAGGGGACAGGCCAGTTCT | | AGGCGGCGCGGGGGGGGC | | |
| | | GCACCTGGCCTTTCTCCAG | | TGGCCTCTGAGCATCTGG | | |
| | | AATGAAGGCCTCCACCTCC | | CTGCATTTAGCACG | | |
| | | CGTCCGTCCCCACAG | | (SEQ ID NO: 16) | | |
| | | (SEQ ID NO: 15) | | | | |
| ARFGAP2 | chr11: | TTTCTCAGCCAGTACCCCA | AGTCCGTGTATCTGTCA | GTAAgcGACAGCTGCTTG | AGTCCGTGTATCTGT | (SEQ |
| | 47194261: | GCCTGTCCTTTAACTCTTT | GCTAAAGGGGCCCTTCC | GGGAGCCCAGCCCCTGTT | CAGCTAAAGGGGCCC | ID NO: |
| | 47194302 | CCTACATTTTCCTTAGTGT | TGCCAGAG (SEQ ID | CTCAGCTTCCTGCTTTAG | TTCCTGCCAGAtG | 53) |
| | | CTTTCAGACTTGGTTCAGG | NO: 39) | AAGCGGAGCCTGGTGCTC | (SEQ ID NO: 40) | |
| | | GCGAACAGTCCATTTGCTG | 5′ splice site of | ACCATATGCTCCCTGCCT | | |
| | | ACCTCGGTTTGTTCTGTTG | alternatively- | CGCAGTCTTTGTTTTGGT | | |
| | | ACTCTTGGGGGTTGGGGCT | spliced exon | TCAGGGAATTTGGACGTC | | |
| | | GGAACCCAGCAGAGTGACT | was modified to | TCTGGTGCTTCGGACGTC | | |
| | | GTCAGACTGATCCATGAGA | ATG\|GTAAGC | TCTGGTGCTTCAGGTCTA | | |
| | | AGGCTGGCATAGCTTGGTC | | GGTTCCTGTCTC (SEQ | | |
| | | TGAAGCAGGGCTTCATAGA | | ID NO: 18) | | |
| | | GACCGCTGGGCTTGGGAGC | | | | |
| | | TCTGTGGAGGCTCTGGGGT | | | | |
| | | GGGCCTCTTGTTAGCCACA | | | | |
| | | AGTCTGTTTCTCCTCCAG | | | | |
| | | (SEQ ID NO: 17) | | | | |
| KIF13A | chr6: | GACTTCATCACaaaaGAAG | GTGGCTTCCCGATAATA | GTTTgTAACTGATTGGCA | GTGGCTTCCCGATAA | (SEQ |
| | 17822017: | TTATGTTTCCCCCTACCCC | AGCCTGTCTGCCTGGTG | TTGGCATGAGGGAGCTTG | TAAGCCTGTCTGCCT | ID NO: |
| | 17822136 | ATCCTTTACCCAGTTCCAG | GTCATCCCCTTGGTGGT | GCTGGTTTTTAGCAGTGC | GGTGGTCATCCCCTT | 54) |
| | | TGGAGCTTCCCTTTGGGGC | CTTATTTGAAGATCCTC | TGCTGATTGATGCTCATG | GGTGGTCTTATTTGA | |
| | | ATACACACAGTCTCTGATG | TTTCCTCTCATGTGGTT | CTCCATGCTTTGGCAAAA | AGATCCTCTTTCCTC | |
| | | CAAGTGCTGATGTGCCGGT | TCAGACGAAGCTCCTCC | ATCTAACTAACATGATTG | TCAaGTGGTTTCAGA | |
| | | GGCTGGACGGTGTTCACTG | ACAAACACTGGGATAAA | GGAAGAAGCTGGAGTTTT | CGAAGCTCCTCCACA | |
| | | TGATTCCCCTCTACTGCTA | G (SEQ ID NO: 41) | CTGGCTGATGAAGGIGTT | AACACTGGGATAAAt | |
| | | G (SEQ ID NO: 19) | 5′ splice site of | CTGTATTCTTCATTGAGG | G (SEQ ID NO: | |
| | | | alternatively- | AATGTTCCTTTTCAATTA | 42) | |
| | | | spliced exon | TGAACACCCCACCCCCAA | | |
| | | | was modified to | CACACACACAC (SEQ | | |
| | | | ATG\|GTTTGT | ID NO: 20) | | |
| PICALM | chr11: | AGGTATTTTTTGTTTTTGA | ATCCTTTCTCTGCTACT | GTAAAGTACCATTTAACC | ATCCTTTCTCTGCTA | (SEQ |
| | 85701293: | TAATTTAGATATTTAAGAT | GTAGATGCTGTTGATGA | TTTTTTTCCAATCAATGT | CTGTAGAGCTGTTGT | ID NO: |
| | 85701442 | TAATAAACAATAATATAGT | TGCCATTCCAAGCTTAA | TTATACTGCCTAACTATA | GATCCATTCCAAGCT | 55) |
| | | TACTACTTTTCACTTTGCA | ATCCTTTCCTCACAAAA | TTTTACGTGTCCATTAAT | TAAATCCTTTCCTCA | |
| | | TCTTTTGACTAATTACAAT | AGTAGTGGTGATGTTCA | TATTTTAAAAGCACTGCA | CAAAAAGTAGTGGTG | |
| | | ACTAATTTATTTACTTCCT | CCTTTCCATTTCTTCAG | ATAGTTACTTTAGATTTT | AGTTCACCTTTCCAT | |
| | | TTCTTCATTTTGCTATAAT | ATGTATCTACTTTTACT | AATATCAAATTCTAAAAC | TTCTTCAGATtGTAT | |
| | | ACATTTGGACTGCACAG | ACTAGGACACCTACTCA | TAACCAGCCATAATGTAG | CTACTTTTACTACTA | |
| | | (SEQ ID NO: 21) | TGAAATGTTTGTTG | TGAGGTTTTTAAATTGAC | GGACACCTACTCATt | |
| | | | (SEQ ID NO: 43) | ACTGGTATCCCAATTTTA | GAAAGTTTGTaTG | |
| | | | 5′ splice site of | TTTATACAGACTTTTAGG | (SEQ ID NO: 44) | |
| | | | alternatively- | AA (SEQ ID NO: 22) | | |
| | | | spliced exon | | | |
| | | | was modified to | | | |
| | | | ATG\|GTAAAG | | | |

### C. Example 3: Splicing Events that Exhibit Regulation During T-Cell Activation

[0578] A regulatory cassette (e.g., an alternatively-spliced exon cassette) is designed that exhibits dynamic behavior during T-cell activation. In some embodiments, such a cassette controls regulators of T-cell biology in the context of lentiviral-based cargoes (e.g., CAR-T approaches). For example, upon T-cell activation, a cargo produced using a regulatory cassette as described herein modulates the outcome of that T-cell. Exons from genes that have been previously shown to exhibit splicing changes upon T-cell activation, as published in the literature and shown in Table 2, will be tested.

[0579] In some embodiments, the intronic sequences flanking the exons shown in Table 2, along with the exons, will be introduced into a lentivirus splicing reporter and tested in resting and activated T-cells to assess activity. Sequence cassettes that exhibit behavior that is similar to their endogenous counterparts will be further developed to control heterologous cargoes. Exons from these genes were selected because they have been observed to change in splicing behavior following T-cell activation. It is expected that, when taken out of their endogenous context and placed within an AAV-delivered transgene, some of the exons will recapitulate behavior in activated T-cells.

TABLE 2
Exons from genes previously shown to exhibit splicing changes upon T-cell activation.

| | Evidence in Primary T | Evidence in Jurkat Splicing | |
|---|---|---|---|
| Gene | cells (Yes/No) | Line 1 (Yes/No) | Reference (PMID) |
| ABCC1 | Yes | | 26443849 |
| AK125149 | Yes | | 26443849 |
| ASCC2 | Yes | | 26443849 |
| BAT2D1 | | Yes | 22454538 |
| BBX | Yes | | 26443849 |
| BRD8 | | Yes | 22454538 |
| BRE | Yes | | 26443849 |
| C17orf70 | | Yes | 22454538 |
| CAMKK2 | Yes | | 26443849 |
| CBFB | Yes | | 26443849 |
| CCAR1 | Yes | | 26443849 |
| CCDC7 | Yes | | 26443849 |
| CD6 | Yes | | 24890719 |
| CHTF8 | Yes | | 26443849 |
| COL4A3BP | | Yes | 22454538 |
| COL6A3 | Yes | | 26443849 |
| CUGBP1 | Yes | | 17307815 |
| CUGBP2 | Yes | | 17307815 |
| CXorf45 | Yes | | 26443849 |
| DENND3 | Yes | | 26443849 |
| DGUOK | | Yes | 22454538 |
| DKFZp762G094 | Yes | | 26443849 |
| DNAJC7 | Yes | | 26443849 |
| DNASE1 | Yes | | 30521874 |
| EIF4A2 | Yes | | 26443849 |
| EIF4G2 | Yes | | 17307815 |
| EIF4H | Yes | | 26443849 |
| EXOC7 | Yes | | 26443849 |
| EZH2 | Yes | | 26443849 |
| FAM120A | Yes | | 26443849 |
| FAM136A | | Yes | 22454538 |
| FAM36A | | Yes | 22454538 |
| FARSB | | Yes | 22454538 |
| FBXO38 | Yes | | 26443849 |
| FGFR1OP2 | Yes | | 26443849 |
| FIP1L1 | | Yes | 22454538 |
| FOXRED1 | Yes | | 26443849 |
| FUBP3 | Yes | | 26443849 |
| GALT | | Yes | 22454538 |
| GATA3 | Yes | | 17307815 |
| GOLGA2 | Yes | | 26443849 |
| HIF1A | Yes | | 17307815 |
| HMMR | Yes | | 17307815 |
| HRB | Yes | | 17307815 |
| IKZF1 | Yes | | 26443849 |
| ILF3 | Yes | | 17307815 |
| IRAK4 | Yes | | 26443849 |
| IRF1 | Yes | | 17307815 |
| KCTD13 | Yes | | 26443849 |
| LEF1 | Yes | | 26443849 |
| LUC7L | Yes | | 26443849 |
| LYRM1 | Yes | | 26443849 |
| MALT1 e7 | Yes | | 27068814 |
| MAP2K7 | Yes | | 17307815 |
| MAP3K7 | | Yes | 22454538 |
| MAP4K2 | Yes | | 17307815 |
| MBNL2 | Yes | | 26443849 |
| MFF | Yes | | 26443849 |
| NAE1 | Yes | | 26443849 |
| NCSTN | | Yes | 22454538 |
| NR4A3 | Yes | | 26443849 |
| NRF1 | Yes | | 26443849 |
| NUP98 | Yes | | 26443849 |
| PARP6 | | Yes | 22454538 |
| PCM1 | Yes | | 26443849 |
| PLAUR | Yes | | 26443849 |
| PLSCR3 | | Yes | 22454538 |
| PPIL5 | Yes | | 26443849 |
| PPP5C | Yes | | 26443849 |
| PTPRC-E4 | | Yes | 22454538 |
| PTPRC-E6 | Yes | | 17307815 |
| PTS | Yes | | 26443849 |
| RABL5 | | Yes | 22454538 |
| RAPH1 | Yes | | 26443849 |
| SEC16A | | Yes | 22454538 |
| SFRS3 | Yes | | 26443849 |
| SFRS7 | Yes | | 26443849 |
| SLMAP | Yes | | 26443849 |
| SNRNP70 | Yes | | 26443849 |
| STAT6 | | Yes | 22454538 |
| TBC1D1 | | Yes | 22454538 |
| TIMM8B | Yes | | 26443849 |
| TIR8 | | Yes | 22454538 |
| TRA2A | Yes | | 26443849 |
| TROVE2 | Yes | | 26443849 |
| UGCGL1 | Yes | | 26443849 |
| VAP-B | Yes | | 26443849 |
| VAV1 | Yes | | 17307815 |
| ZNF384 | | Yes | 22454538 |
| ZNF496 | | Yes | 22454538 |

### D. Example 4: Broad Discovery of Tissue-Specific AAV Cassettes

[0580] A broad screen was performed to identify tissue-specific exon cassettes that exhibit similar behavior when placed within the context of an AAV cargo. These exons were identified using RNAseq data and exons that are <200 nucleotides long and exhibit high conservation across multiple species were chosen. These alternatively-spliced exons and their proximal introns are packaged into a heterologous context such that their inclusion level can be assessed by RT-PCR or deep sequencing. Nucleotide barcodes are included in the 3′ untranslated region such that the identity of each exon cassette can be determined by deep sequencing the barcode. The exon cassettes are packaged as a pool into an AAV library and administered to mice. Tissues or cell types of interest are harvested, and RNA originating from the AAV transgenes is prepared for deep sequencing such that psi values can be associated with each barcode in each tissue. Exon cassettes that exhibit tissue-specific behaviors of interest are identified using this procedure.

[0581] Examples of datasets used to identify tissue specific exons can be found in Wang, et al. (2008), Alternative isoform regulation in human tissue transcriptomes, Nature 456(7221): 470-76; Li, et al. (2017), A Comprehensive Mouse Transcriptomic BodyMap across 17 Tissues by RNA-seq, Sci. Rep. 7(1): 4200; and the GEO dataset entitled “[E-MTAB-513] Illumina Human Body Map 2.0 Project” (Series GSE30611).

### E. Example 5: Research Operating Procedure

[0582] A general research operating procedure for how to develop gene therapies that take advantage of alternative regulation is also provided. This approach can be generalized to facilitate the identification of particular sequences that confer regulatory behavior that is desired. In some embodiments, it is desirable to prevent over-dosing or over-expression in a given tissue.

[0583] The procedure is as follows:
[0584] (1) The cargo of interest is expressed using AAV in the tissue or cell types of interest.
[0585] (2) Transcriptome profiling is performed to identify exons that are sensitive to transgene over-expression.
[0586] (3) Using the exons identified in (2), alternatively-spliced exon cassettes that allow for control of the transgene are designed. The design may in some embodiments use the two methods described in Example 1 (e.g., place the ATG within the alternatively-spliced exon, or make the alternatively-spliced exon an NMD substrate). In some embodiments, modifications are made to ensure that the cassette responds appropriately to the transgene. In some embodiments, this work is done in vitro. In some embodiments, this work is done in vivo.
[0587] (4) A library of mutagenized splice sites or intronic elements is made that uses the alternatively-spliced exon cassette identified in (3) as the starting point. Barcodes are incorporated such that mutations can be linked to distinct barcodes. An AAV library is generated and administered in vivo in all the settings of interest (e.g., transgene over-expression or wild-type animals). Psi values of all variants are read out by deep sequencing and “winners” are chosen.
[0588] (5) The winners are individually tested in vivo.

### F. Example 6: Engineering Tissue-Specific Alternative Splicing to Regulate Gene Therapy Cargoes

[0589] A major challenge in the gene therapy field is to develop strategies yielding precise cargo expression—in levels, location, and timing. Because functional transduction of many tissues and cell types by viral vectors remains relatively inefficient, existing cargo sequences often incorporate strong promoters and minimal 5′ and 3′ UTR elements that enhance RNA stability and translation efficiency, aiming to maximize gene expression levels. However, over-expression of some cargoes in certain cell types and tissues may lead to toxicity, thus narrowing or eliminating the therapeutic windows available to treat disease. Solutions to achieve cell type-specific expression include use of tissue-specific promoters, incorporation of regulatory elements within mRNA sequence (e.g., microRNA binding sites), and packaging of cargoes into capsid variants exhibiting cell type-specific tropisms. These approaches, however, provide limited control, and fail to incorporate certain basic mechanisms of gene regulation ubiquitously employed by the naturally-occurring genome. One of these mechanisms is alternative splicing, which has been relatively unexplored as a mechanism by which to regulate gene therapy cargo expression.

[0590] Alternative splicing occurs in −95% of all multi-exonic human genes, with a major portion of regulated exons showing a tissue or cell type-specific bias (1). The most studied form of alternative splicing is the “skipped exon” or “cassette exon”, in which an alternative exon can be included or excluded between a pair of constitutive exons. The present inventors have identified a subset of “switch-like” cassette exons that show differences in inclusion level between tissues; these exons tend to preserve reading frame more frequently than other cassette exons and display increased phylogenetic conservation in the −200 intronic nucleotides both upstream and downstream of these exons.

[0591] Regulation of alternative splicing is controlled by core spliceosomal machinery, along with RNA binding proteins (RBPs); many RBPs themselves show tissue-specific expression profiles (2). Mechanistic studies of alternative splicing regulation are often performed by cloning the cassette exon sequence (e.g., upstream intron, cassette exon, and downstream intron) into a heterologous context in which the flanking constitutive exons are taken from a separate gene (3). For example, beta globin exons 1-3 (4) and SMN1 exons 6-8 (5,6) are commonly employed exon/intron contexts into which cassette exon sequences have been incorporated for further study. In addition, the behavior of alternatively spliced exons can be recapitulated in heterologous contexts and has even been re-purposed to control fluorescent reporter expression (7). Similar concepts have been used to regulate AAV-mediated gene expression in vivo using alternative splicing, wherein expression of a target gene is controlled via exposure to, for example, an aptamer ligand, such as a small molecule (8,9). However, no attempts have been made to use exons displaying cell- or tissue-specific, or endogenous activity-dependent, splicing patterns to regulate gene therapy cargoes.

[0592] The current gene therapy landscape is focused on a multitude of disease indications, but several broad areas could benefit from improved cell or tissue type-specific regulation. Firstly, observed toxicities of AAV-delivered therapies in dorsal root ganglia suggest that minimization of heterologous cargo expression in this tissue could be beneficial, even if a major portion of the toxicity is capsid-mediated. Secondly, a great number of gene therapies are being developed for neuromuscular or cardiac indications; however, some cargoes that are therapeutic in one tissue may be toxic when over-expressed in the other, and there are limited approaches available to fully de-target either tissue.

[0593] Described herein is a general approach to re-purpose, engineer, and optimize alternative splicing cassettes to de-target specific tissues and cell types. Alternative splicing cassettes were engineered to control protein cargo expression in the context of AAV. These cassettes were designed such that incorporation of the AUG translation initiation codon within the cassette exon would lead to cargo production upon inclusion (FIG. 9), and/or such that incorporation of a premature stop codon within the cassette exon would lead to nonsense-mediated decay of the cargo mRNA upon inclusion. Screens were performed across hundreds of candidates in vivo, and proof of concept is provided herein for how to further optimize sequences that confer switch-like behavior. Individual sequences of interest were tested and both splicing patterns and total protein output were assessed as gold standards for the extent of de-targeting.

[0594] The approach described herein, Tissue-specific Alternative splicing to Restrict Globally Expressed Therapeutic (TARGET), is broadly applicable to any set of tissues or cell types and can be applied to any cargo that satisfies viral packaging limit restrictions in any virus that supports packaging of splicing-competent transgenes. Some viruses that undergo splicing during packaging (e.g., lentivirus) would require encoding of the transgene on the minus strand of the viral genome to avoid removal of introns during the packaging process.

### Results

### Identification of Alternative Exon Candidates and Selection of Transgene Context

[0595] RNAseq datasets were analyzed to identify candidate exons that display extreme “switch-like” behavior between human heart (10) and skeletal muscle (SRA project SRP082676). These candidates were further filtered by those that were also conserved to mouse, and those which displayed similar percent spliced in (psi) values in mouse heart (low psi) and skeletal muscle (high psi). A set of 11 cassette exons were selected and ˜500 nucleotides of total sequence were cloned—including the cassette exon and immediately adjacent flanking introns—into the SMN1 exon 6/intron 7 context, which has been previously used to study alternative splicing regulation (11) (FIG. 10). The MTM1 coding sequence, which expresses the myotubularin protein, a protein that is missing in boys affected by X-linked myotubular myopathy (12) (XLM™), was chosen as the therapeutic cargo. Although MTM1 expression in skeletal muscle is therapeutic, questions have been raised about whether over-expression in heart can lead to toxicity (13), providing motivation to identify cassettes that may preferentially de-target heart but preserve skeletal muscle expression.

### Mutations to Facilitate Translation Initiation at the End of the Alternative Exon and Avoid Spurious Downstream Translation

[0596] For each of the alternative exon candidates, the final nucleotides of the exon were altered to either be “ATG”, “AT”, or “A” (depending on which nucleotides naturally occurred), such that initiation of translation could be achieved when the exon was included. Additionally, any upstream ATGs within the alternative exon were removed by substitution or deletion, to avoid translation initiation at an earlier location. In the case of exon skipping, downstream ATGs within the MTM1 coding sequence might lead to translation of unwanted protein fragments; thus, stop codons were introduced within 15 nucleotides of each of these ATGs, such that translation would terminate within just a few (<5) amino acids (FIG. 11). These ATGs and stop codons all resided in a reading frame distinct from the normal MTM1 reading frame, and thus mutations required to generate these stop codons could preserve the amino acid composition of MTM1. For other cargoes in which internal methionines are present, new out-of-frame short peptide sequences could be introduced upstream of these methionines such that translation of these short, benign peptides is favored over translation of a N-terminally truncated cargo (re-initiation of translation following a stop codon typically does not occur unless there are additional regulatory elements such as internal ribosomal entry sites).

### Mutations to Preserve Splice Site Strength and Considerations of the Kozak Sequence

[0597] Because changes to the end of the alternative exon sequence can affect the strength of the alternative exon's 5′ splice site, both the original and altered 5′ splice sites of the alternative exon were scored using MaxEntScan (14) and compensatory mutations were made to the intronic bases of the alternative exon's 5′ splice site to compensate for any potential weakening of the splice site signal (FIG. 12; Table 3). The bases of the alternative exon which upstream of the ATG initiation sequence were also analyzed for translation initiation potential (15), and almost all sequences in this set showed reasonably strong scores. Additional mutations within the alternative exon could be made to increase similarity to the Kozak consensus sequence.

Barcoding Method to Uniquely Identify Each Alternative Exon within the Pool of Candidates

[0598] A unique nucleotide “barcode” sequence was introduced within the MTM1 coding sequence such that it preserved the amino acid composition of MTM1, but also uniquely identified the upstream alternative exon cassette (FIG. 13). This barcode was necessary so that the frequency of alternative exon inclusion could be properly computed; the alternative exon identity is evident when it is included, but the barcode is required for identification when it is skipped. The number of deep sequencing reads that cross the splice site junctions (read 1 of each read pair) thus can be associated with the deep sequencing reads that capture each barcode (read 2 of each read pair), facilitating calculation of percent spliced in (psi, Ψ) for each candidate. This is similar in principle to other published approaches (6,16).

### Viral Packaging, Delivery In Vivo, Library Preparation, and Sequencing

[0599] All 11 alternative exon candidates (see Table 3 for exon coordinates, psi values, translational initiation scores, and sequence alterations) were packaged into AAV9 as a pool and administered to mice systemically (retro-orbital injection, 4 C57/BL6 mice and 2 FVB mice at 6 weeks of age, 2e13 vg/kg) and intramuscularly (4 C57/BL6 mice at 6 weeks of age, tibialis anterior, 2e11 vg total into one leg). Mice were sacrificed after 4 weeks; the heart and liver were harvested from the systemically injected animals and the tibialis anterior (TA) was harvested from the intramuscularly injected animals. Reverse transcription and polymerase chain reaction was performed using primers targeting the upstream SMN1 exon 6 and also a region in MTM1 3′ of the barcode. Illumina adapters with unique indexes to identify each sample were incorporated into the final amplicon libraries and then sequenced.

TABLE 3
Alternative exon candidates.

| | | | Coordinates | Last 3 nt | Translation | Kozak | Splice | Alter- |
|---|---|---|---|---|---|---|---|---|
| Gene | Heart PSI | Muscle PSI | (hg19) | of exon | initiation | score | Site | ation? |
| CAMK2B | 0.01, 0.01, | 0.94, 0.95, | chr7: | AtG | GGAACAAtGGC | 92 | AAGGTAGAT | AtGGT |
| | 0.01 | 0.96 | 44279188: | | (SEQ ID | | | AGGT |
| | | | 44279262 | | NO: 90) | | | |
| PKP2 | 0.01, 0.01, | 0.98, 0.90, | chr12: | ATG | ACCAACATGGC | 105 | ATGGTGAGA | |
| | 0.01 | 0.91 | 32996116: | | (SEQ ID | | | |
| | | | 32996247 | | NO: 91) | | | |
| LGMN | 0.03, 0.01, | 0.32, 0.60, | chr14: | AtG | GATTACAtGGC | 90 | CAGGTGTGT | AtGGT |
| | 0.03 | 0.69 | 93207407: | | (SEQ ID | | | aTGT |
| | | | 93207524 | | NO: 92) | | | |
| NRAP | 0.04, 0.03, | 0.96, 0.94, | chr10: | GAT | CCAGTGATGGC | 103 | GATGTGAGT | |
| | 0.01 | 0.81 | 115402693: | | (SEQ ID | | | |
| | | | 115402797 | | NO: 93) | | | |
| VPS39 | 0.02, 0.03, | 0.85, 0.95, | chr15: | GCA | AGCGGCATGGC | 110 | GCAGTAAGT | |
| | 0.04 | 0.93 | 42484264: | | (SEQ ID | | | |
| | | | 42484296 | | NO: 94) | | | |
| KSR1 | 0.20, 0.15, | 0.99, 0.92, | chr17: | AtG | CTTTCCAtGGC | 98 | CAGGTGAGT | AtGGT |
| | 0.06 | 0.99 | 25928386: | | (SEQ ID | | | GAGT |
| | | | 25928427 | | NO: 95) | | | |
| PDLIM3 | 0.13, 0.20, | 0.92, 0.97, | chr4: | AtG | TTGcTGAtGGC | 90 | GAGGTAATA | AtGGT |
| | 0.07 | 0.96 | 186429453: | | (SEQ ID | | | AAgA |
| | | | 186429716 | | NO: 96) | | | |
| BIN1 | 0.08, 0.20, | 0.93, 0.94, | chr2: | AtG | AAGAACAtGGC | 120 | CAGGTACCG | AtGGT |
| | 0.10 | 0.94 | 127818172: | | (SEQ ID | | | ACgt |
| | | | 127818216 | | NO: 97) | | | |
| ARFGAP2 | 0.08, 0.06, | 0.90, 0.87, | chr11: | AtG | TGCCAGAtGGC | 105 | GAGGTAACT | AtGGT |
| | 0.02 | 0.82 | 47194261: | | (SEQ ID | | | Aagc |
| | | | 47194302 | | NO: 98) | | | |
| KIF13A | 0.01, 0.07, | 0.82, 0.78, | chr6: | AtG | GGATAAAtGGC | 122 | AAGGTTTTT | AtGGT |
| | 0.04 | 0.71 | 17822017: | | (SEQ ID | | | TTgT |
| | | | 17822136 | | NO: 99) | | | |
| PICALM | 0.04, 0.03, | 0.68, 0.75, | chr11: | aTG | GTTTGTaTGGC | 65 | TTGGTAAAG | aTGGT |
| | 0.03 | 0.80 | 85701293: | | (SEQ ID | | | AAAG |
| | | | 85701442 | | NO: 100) | | | |

### Analysis of Deep Sequencing Reads

[0600] Psi values were computed by associating junction reads to barcodes and computing the frequency of inclusion versus exclusion of each exon (FIGS. 14A-14C). Exons from BIN1, CAMK2B, KIF13A, LGMN, and PICALM showed higher inclusion levels in skeletal muscle (TA) and heart (H), and the BIN1 exon candidate showed the largest dynamic range, with −15% inclusion in heart and −60% in TA. In addition, the BIN1 exon also showed −0% inclusion in liver (L). These results provide proof of concept for the overall screening strategy and identify alternative exon cassettes that would be predicted to minimize translation of MTM1 in heart as compared to skeletal muscle.

### Supplemental Data: Reproducibility of Results as a Function of Time Following Dosing

[0601] To assess whether the time following intramuscular administration might influence the psi value assessment, the same library was administered into 7 additional mice intramuscularly (2e11 vg total into one tibialis anterior (TA) of each mouse). The TAs were harvested 1, 2, 3, or 4 weeks following dosing. Sequencing libraries were generated and the psi values were correlated for each exon candidate across all samples. The results were strongly concordant, regardless of what time point was analyzed (FIGS. 15A-15B).

Screens to Identify Sequences that Further De-Target Heart but Maximize Expression in Skeletal Muscle

[0602] Based upon the initial hits of the first screen, described above, alternative exon cassette sequences were identified which might further enhance the switch-like behavior in heart versus skeletal muscle. A higher throughput approach was taken to simultaneously screen many sequence variants of candidate alternative exon cassettes. Core splice site sequences as well as intronic/exonic sequences play important roles in splicing decisions, by modulating the ability of specific trans-factors to bind a pre-mRNA. The core splicing signals, which include the 3′ splice site, 5′ splice site, and branch point, can all influence the frequency with which an alternatively spliced exon is chosen. These core splicing signals are recognized by the U1, U5, and U2 snRNPs, among other components; but they may also be bound by other RNA binding proteins (RBPs), which play roles in modulating how well the basal splicing machinery can recognize the core signals. Furthermore, RBPs can bind to intronic or exonic sequence in the vicinity of these core splicing signals to affect overall splicing decisions. The abundance of certain RBPs in certain contexts can therefore influence splicing patterns in those contexts. To aid efforts to further optimize sequences that display switch-like alternative splicing in heart versus skeletal muscle, the expression level of RNA binding proteins in these 2 tissues was analyzed (FIGS. 16A-16B). RNA expression levels were obtained from GTEX (17), and RBPs were defined from RBPDB (18). The ratio of expression in heart versus skeletal muscle was computed, and used to identify RBPs showing strongest differential expression between these 2 tissues; these RBPs would be predicted to be trans-factors that might be responsible for influencing splicing decisions of highly heart versus skeletal muscle-specific exons.

[0603] The high throughput screening approach described herein was first applied to BIN1 exon 11 because it showed the largest dynamic range in psi between heart and skeletal muscle (see FIGS. 14A-14C). BIN1 exon 11 has been previously studied and demonstrated to be responsive to RNA binding proteins such as the Muscleblind-like proteins (19) and RBFOX proteins (20); consistent with this, RBFOX1 and MBNL1 are the 5th- and 11th-most enriched RBPs, respectively, in skeletal muscle relative to heart. The upstream intron of BIN1 exon 11 is enriched for CAC motifs (10 instances versus an expectation of 3.8); pairs of CAC motifs separated by a variable spacer are known to bind RBPMS2 (21). RBPMS2 represses exon inclusion when binding to upstream introns (22) and is the 2nd-most enriched RBP in heart as compared to skeletal muscle. Notably, the psi values of BIN1 exon 11 in human and rhesus macaque heart are all close to 0%, but in dog, which contains only 1 instead of 2 CAC motifs in the 3′ splice site of BIN1 exon 11, unlike the other organisms, shows a psi value of −50% for BIN1 exon 11 (23) (FIGS. 17 and 18). Thus, RBPMS2 might be a critical factor that represses BIN1 exon 11 in heart.

[0604] Given all of the above information, the 3′ splice site, 5′ splice site (FIG. 19), and downstream intron (FIG. 20) of BIN1 exon 11 was systematically altered to explore different splice site strengths, different configurations of CAC motifs within the 3′ splice site, and different frequencies of MBNL and RBFOX binding sites within the downstream intron. In total, AAV plasmid libraries were generated that contained 7 possible 3′ splice sites, 6 possible 5′ splice sites, and 16 possible downstream intronic sequences. The splice sites varied in strength, and the intronic sequences varied in the number of predicted MBNL and RBFOX binding sites. A total of 672 sequence variants were possible; each variant was linked to unique 10 nucleotide-long barcodes placed within the downstream coding sequence of MTM1. Each variant could be linked to several unique barcodes, such that multiple barcodes could serve as “replicates” for each sequence variant. Deep sequencing of PCR products amplified from plasmid libraries (FIG. 21) showed the presence of 663/672 variants, with an average of −8 barcodes per variant (FIG. 22).

[0605] Viruses were generated using the eMyoAAV capsid (24) and administered to mice at a titer of 2.5e13 vg/kg. Heart, tibialis anterior, and triceps muscles were collected from mice sacrificed 3 weeks following administration. Sequencing libraries were prepared by RT-PCR and sequenced by Illumina sequencing. Psi values were computed for each barcode and a psi value for each variant was obtained by averaging the psi across every barcode for each variant. The psi value for each variant is shown for 2 heart samples in a scatter plot (FIG. 23A), and similarly, for 2 gastrocnemius samples (FIG. 23B), or a heart sample versus a gastrocnemius sample (FIG. 23C). The mean psi was computed for each variant across replicate tissues from multiple animals (n=4 animals for each tissue). These mean psi values for each variant were also plotted (FIGS. 24A-24B) and listed (Table 4). Psi values for each variant were also plotted as a function of 3′ splice site strength or 5′ splice site strength in heart and gastrocnemius (FIGS. 25A-25D), and clear dependencies of psi on splice site strength were observed. This relationship is particularly strong between 5′ splice strength and psi, supporting the idea that this screening approach can accurately quantitate relative psi values and identify sequence variants that exhibit specific splicing patterns.

[0606] The same BIN1 exon 11 variants were also tested with a different cargo, CAPN3. A separate AAV library was generated in which all 672 BIN1 variants (Table 4) were cloned upstream of the CAPN3 coding sequence, analogously to how they were cloned upstream of the MTM1 coding sequence. Similarly, a 10 nucleotide barcode was embedded within the CAPN3 coding sequence to identify each splice variant. The mean psi values across heart, gastrocnemius, and tibialis anterior tissues from 4 animals were plotted as scatters (FIGS. 26A-26B), showing that some variants show lower inclusion in heart than in skeletal muscles. The overall behavior of each variant is strongly correlated across MTM1 and CAPN3 cargoes, but the baseline inclusion level of the BIN1 cassette is lower when linked to the CAPN3 cargo; this trend is observable when plotting the scatter of psi variants for each cargo in heart and gastrocnemius (FIGS. 27A-27B).

TABLE 4
Table of BIN1 exon 11 variants screened and associated psi values.

| | 3′ splice site | 5′ splice site | Intron | MTM1_Heart | MTM1_Gastroc | MTM1_Tibialis | CAPN3_Heart | CAPN3_Gastroc | CAPN3_Tibialis | SEQ |
|---|---|---|---|---|---|---|---|---|---|---|
| ID | ID | ID | insertions | (psi) | (psi) | (psi) | (psi) | (psi) | (psi) | ID NO: |
| 1 | BIN1 3′ ss | Compensated | None | 0.256 | 0.561 | 0.56975 | 0.034 | 0.09325 | 0.07625 | 107 |
| 2 | BIN1 3′ ss | Compensated | 4 | 0.335 | 0.61925 | 0.63175 | 0.032 | 0.28975 | 0.128 | 108 |
| 3 | BIN1 3′ ss | Compensated | 3 | 0.277 | 0.58325 | 0.607 | 0.03625 | 0.012 | 0.053 | 109 |
| 4 | BIN1 3′ ss | Compensated | 3, 4 | 0.34675 | 0.60175 | 0.5075 | 0.0705 | 0.1965 | 0.06125 | 110 |
| 5 | BIN1 3′ ss | Compensated | 2 | 0.29425 | 0.7735 | 0.89575 | 0.032 | 0.1075 | 0.0895 | 111 |
| 6 | BIN1 3′ ss | Compensated | 2, 4 | 0.33325 | 0.69075 | 0.739 | 0.03575 | 0.03925 | 0.01975 | 112 |
| 7 | BIN1 3′ ss | Compensated | 2, 3 | 0.272 | 0.7025 | 0.6855 | 0.02125 | 0.0845 | 0.05 | 113 |
| 8 | BIN1 3′ ss | Compensated | 2, 3, 4 | 0.37075 | 0.67875 | 0.687 | 0.04275 | 0.094 | 0.13575 | 114 |
| 9 | BIN1 3′ ss | Compensated | 1 | 0.34075 | 0.665 | 0.66875 | 0.038 | 0.104 | 0.08625 | 115 |
| 10 | BIN1 3′ ss | Compensated | 1, 4 | 0.33925 | 0.5715 | 0.62775 | 0.0435 | 0.08375 | 0.196333333 | 116 |
| 11 | BIN1 3′ ss | Compensated | 1, 3 | 0.373 | 0.6905 | 0.527 | 0.0545 | 0.06275 | 0.11175 | 117 |
| 12 | BIN1 3′ ss | Compensated | 1, 3, 4 | 0.49075 | 0.76675 | 0.7275 | 0.06975 | 0.0835 | 0.15725 | 118 |
| 13 | BIN1 3′ ss | Compensated | 1, 2 | 0.30625 | 0.6965 | 0.709 | 0.037 | 0.16525 | 0.11 | 119 |
| 14 | BIN1 3′ ss | Compensated | 1, 2, 4 | 0.3455 | 0.54075 | 0.575 | 0.037 | 0.0785 | 0.2615 | 120 |
| 15 | BIN1 3′ ss | Compensated | 1, 2, 3 | 0.26775 | 0.6765 | 0.61975 | 0.0465 | 0.19175 | 0.158 | 121 |
| 16 | BIN1 3′ ss | Compensated | 1, 2, 3, 4 | 0.38275 | 0.67925 | 0.48825 | 0.06725 | 0.12175 | 0.1995 | 122 |
| 17 | BIN1 3′ ss | BIN1 5′ ss 1 | None | 0.44025 | 0.7855 | 0.74575 | 0.0805 | 0.17825 | 0.18975 | 123 |
| 18 | BIN1 3′ ss | BIN1 5′ ss 1 | 4 | 0.503 | 0.7605 | 0.772 | 0.11775 | 0.4615 | 0.299 | 124 |
| 19 | BIN1 3′ ss | BIN1 5′ ss 1 | 3 | 0.497 | 0.77675 | 0.81 | 0.117 | 0.18375 | 0.13425 | 125 |
| 20 | BIN1 3′ ss | BIN1 5′ ss 1 | 3, 4 | 0.60025 | 0.813 | 0.76625 | 0.131 | 0.165 | 0.188 | 126 |
| 21 | BIN1 3′ ss | BIN1 5′ ss 1 | 2 | 0.4245 | 0.68775 | 0.729 | 0.07725 | 0.14775 | 0.056 | 127 |
| 22 | BIN1 3′ ss | BIN1 5′ ss 1 | 2, 4 | 0.43725 | 0.72175 | 0.81475 | 0.123 | 0.18175 | 0.2365 | 128 |
| 23 | BIN1 3′ ss | BIN1 5′ ss 1 | 2, 3 | 0.5275 | 0.83625 | 0.79425 | 0.09025 | 0.18025 | 0.19675 | 129 |
| 24 | BIN1 3′ ss | BIN1 5′ ss 1 | 2, 3, 4 | 0.61775 | 0.8395 | 0.82 | 0.13625 | 0.20475 | 0.24975 | 130 |
| 25 | BIN1 3′ ss | BIN1 5′ ss 1 | 1 | 0.5635 | 0.772 | 0.75325 | 0.08975 | 0.0805 | 0.085 | 131 |
| 26 | BIN1 3′ ss | BIN1 5′ ss 1 | 1, 4 | 0.6225 | 0.822 | 0.845 | 0.11625 | 0.1365 | 0.23875 | 132 |
| 27 | BIN1 3′ ss | BIN1 5′ ss 1 | 1, 3 | 0.65975 | 0.8515 | 0.85875 | 0.1645 | 0.395666667 | 0.221 | 133 |
| 28 | BIN1 3′ ss | BIN1 5′ ss 1 | 1, 3, 4 | 0.6495 | 0.8405 | 0.77725 | 0.16375 | 0.137333333 | 0.096 | 134 |
| 29 | BIN1 3′ ss | BIN1 5′ ss 1 | 1, 2 | 0.584 | 0.83175 | 0.7405 | 0.0915 | 0.18025 | 0.11375 | 135 |
| 30 | BIN1 3′ ss | BIN1 5′ ss 1 | 1, 2, 4 | 0.69575 | 0.896 | 0.571 | 0.12275 | 0.3605 | 0.19475 | 136 |
| 31 | BIN1 3′ ss | BIN1 5′ ss 1 | 1, 2, 3 | 0.56625 | 0.80625 | 0.73625 | 0.1245 | 0.2595 | 0.23925 | 137 |
| 32 | BIN1 3′ ss | BIN1 5′ ss 1 | 1, 2, 3, 4 | 0.6595 | 0.7995 | 0.91875 | 0.11975 | 0.09375 | 0.2685 | 138 |
| 33 | BIN1 3′ ss | BIN1 5′ ss 2 | None | 0.23525 | 0.5955 | 0.5705 | 0.0295 | 0.056 | 0.06675 | 139 |
| 34 | BIN1 3′ ss | BIN1 5′ ss 2 | 4 | 0.279 | 0.61275 | 0.65775 | 0.03175 | 0.154 | 0.06425 | 140 |
| 35 | BIN1 3′ ss | BIN1 5′ ss 2 | 3 | 0.1865 | 0.5205 | 0.554 | 0.0355 | 0.11725 | 0.101 | 141 |
| 36 | BIN1 3′ ss | BIN1 5′ ss 2 | 3, 4 | 0.30075 | 0.623 | 0.602 | 0.03225 | 0.073 | 0.076 | 142 |
| 37 | BIN1 3′ ss | BIN1 5′ ss 2 | 2 | 0.19725 | 0.62725 | 0.65425 | 0.02075 | 0.0425 | 0.0275 | 143 |
| 38 | BIN1 3′ ss | BIN1 5′ ss 2 | 2, 4 | 0.24975 | 0.6075 | 0.647 | 0.0265 | 0.045 | 0.02425 | 144 |
| 39 | BIN1 3′ ss | BIN1 5′ ss 2 | 2, 3 | 0.1995 | 0.682 | 0.693 | 0.02225 | 0.06425 | 0.028 | 145 |
| 40 | BIN1 3′ ss | BIN1 5′ ss 2 | 2, 3, 4 | 0.27075 | 0.6875 | 0.675 | 0.03825 | 0.07375 | 0.10475 | 146 |
| 41 | BIN1 3′ ss | BIN1 5′ ss 2 | 1 | 0.2655 | 0.6125 | 0.68575 | 0.0315 | 0.08425 | 0.099 | 147 |
| 42 | BIN1 3′ ss | BIN1 5′ ss 2 | 1, 4 | 0.31925 | 0.6395 | 0.5975 | 0.0445 | 0.0995 | 0.10475 | 148 |
| 43 | BIN1 3′ ss | BIN1 5′ ss 2 | 1, 3 | 0.3245 | 0.67225 | 0.7045 | 0.03 | 0.0835 | 0.104 | 149 |
| 44 | BIN1 3′ ss | BIN1 5′ ss 2 | 1, 3, 4 | 0.33875 | 0.628 | 0.64725 | 0.0485 | 0.08275 | 0.10775 | 150 |
| 45 | BIN1 3′ ss | BIN1 5′ ss 2 | 1, 2 | 0.17525 | 0.58175 | 0.677 | 0.019 | 0.1345 | 0.0945 | 151 |
| 46 | BIN1 3′ ss | BIN1 5′ ss 2 | 1, 2, 4 | 0.29675 | 0.73175 | 0.7265 | 0.0385 | 0.154 | 0.22675 | 152 |
| 47 | BIN1 3′ ss | BIN1 5′ ss 2 | 1, 2, 3 | 0.22975 | 0.69275 | 0.615 | 0.026 | 0.133 | 0.12825 | 153 |
| 48 | BIN1 3′ ss | BIN1 5′ ss 2 | 1, 2, 3, 4 | 0.4445 | 0.81275 | 0.69475 | 0.051 | 0.167 | 0.10325 | 154 |
| 49 | BIN1 3′ ss | BIN1 5′ ss 3 | None | 0.27525 | 0.5135 | 0.522 | 0.029 | 0.0735 | 0.119 | 155 |
| 50 | BIN1 3′ ss | BIN1 5′ ss 3 | 4 | 0.2615 | 0.51225 | 0.5445 | 0.02975 | 0.0875 | 0.0645 | 156 |
| 51 | BIN1 3′ ss | BIN1 5′ ss 3 | 3 | 0.2595 | 0.56425 | 0.63 | 0.0335 | 0.1845 | 0.12775 | 157 |
| 52 | BIN1 3′ ss | BIN1 5′ ss 3 | 3, 4 | 0.3565 | 0.5915 | 0.6615 | 0.05225 | 0.0955 | 0.08575 | 158 |
| 53 | BIN1 3′ ss | BIN1 5′ ss 3 | 2 | 0.222 | 0.5615 | 0.61725 | 0.02425 | 0.05575 | 0.053 | 159 |
| 54 | BIN1 3′ ss | BIN1 5′ ss 3 | 2, 4 | 0.24225 | 0.50025 | 0.492 | 0.0405 | 0.06625 | 0.0925 | 160 |
| 55 | BIN1 3′ ss | BIN1 5′ ss 3 | 2, 3 | 0.199 | 0.5735 | 0.51875 | 0.0185 | 0.194 | 0.07525 | 16 |
| 56 | BIN1 3′ ss | BIN1 5′ ss 3 | 2, 3, 4 | 0.28375 | 0.5335 | 0.6195 | 0.04525 | 0.14725 | 0.0605 | 162 |
| 57 | BIN1 3′ ss | BIN1 5′ ss 3 | 1 | 0.28525 | 0.621 | 0.622 | 0.03825 | 0.16625 | 0.11175 | 163 |
| 58 | BIN1 3′ ss | BIN1 5′ ss 3 | 1, 4 | 0.341 | 0.5825 | 0.573 | 0.0405 | 0.0525 | 0.09175 | 164 |
| 59 | BIN1 3′ ss | BIN1 5′ ss 3 | 1, 3 | 0.33825 | 0.66 | 0.6695 | 0.05575 | 0.159 | 0.1125 | 165 |
| 60 | BIN1 3′ ss | BIN1 5′ ss 3 | 1, 3, 4 | 0.41175 | 0.659 | 0.585 | 0.041 | 0.06025 | 0.0295 | 166 |
| 61 | BIN1 3′ ss | BIN1 5′ ss 3 | 1, 2 | 0.3115 | 0.6545 | 0.62475 | 0.02575 | 0.03725 | 0.0425 | 167 |
| 62 | BIN1 3′ ss | BIN1 5′ ss 3 | 1, 2, 4 | 0.28625 | 0.61425 | 0.56325 | 0.0375 | 0.09825 | 0.10625 | 168 |
| 63 | BIN1 3′ ss | BIN1 5′ ss 3 | 1, 2, 3 | 0.27025 | 0.70475 | 0.648 | 0.02925 | 0.06975 | 0.045 | 169 |
| 64 | BIN1 3′ ss | BIN1 5′ ss 3 | 1, 2, 3, 4 | 0.3995 | 0.7205 | 0.566 | 0.02825 | 0.042 | 0.06025 | 170 |
| 65 | BIN1 3′ ss | BIN1 5′ ss 4 | None | 0.234 | 0.51125 | 0.501 | 0.02 | 0.05225 | 0.03525 | 171 |
| 66 | BIN1 3′ ss | BIN1 5′ ss 4 | 4 | 0.248 | 0.507 | 0.55575 | 0.02525 | 0.055 | 0.04 | 172 |
| 67 | BIN1 3′ ss | BIN1 5′ ss 4 | 3 | 0.195 | 0.4575 | 0.53675 | 0.02025 | 0.06125 | 0.14625 | 173 |
| 68 | BIN1 3′ ss | BIN1 5′ ss 4 | 3, 4 | 0.281 | 0.5025 | 0.608 | 0.028 | 0.0575 | 0.087 | 174 |
| 69 | BIN1 3′ ss | BIN1 5′ ss 4 | 2 | 0.19375 | 0.486 | 0.55925 | 0.01875 | 0.0415 | 0.031 | 175 |
| 70 | BIN1 3′ ss | BIN1 5′ ss 4 | 2, 4 | 0.1675 | 0.4305 | 0.40925 | 0.0165 | 0.036 | 0.04925 | 176 |
| 71 | BIN1 3′ ss | BIN1 5′ ss 4 | 2, 3 | 0.151 | 0.47375 | 0.507 | 0.0155 | 0.074 | 0.03925 | 177 |
| 72 | BIN1 3′ ss | BIN1 5′ ss 4 | 2, 3, 4 | 0.1875 | 0.51275 | 0.45325 | 0.015 | 0.02375 | 0.02875 | 178 |
| 73 | BIN1 3′ ss | BIN1 5′ ss 4 | 1 | 0.236 | 0.54375 | 0.56025 | 0.03125 | 0.06825 | 0.0575 | 179 |
| 74 | BIN1 3′ ss | BIN1 5′ ss 4 | 1, 4 | 0.237 | 0.47725 | 0.50675 | 0.0335 | 0.05225 | 0.09525 | 180 |
| 75 | BIN1 3′ ss | BIN1 5′ ss 4 | 1, 3 | 0.22225 | 0.54 | 0.57275 | 0.0395 | 0.225 | 0.1115 | 181 |
| 76 | BIN1 3′ ss | BIN1 5′ ss 4 | 1, 3, 4 | 0.32675 | 0.57525 | 0.593 | 0.03475 | 0.098 | 0.04425 | 182 |
| 77 | BIN1 3′ ss | BIN1 5′ ss 4 | 1, 2 | 0.197 | 0.55275 | 0.55925 | 0.024 | 0.02775 | 0.01325 | 183 |
| 78 | BIN1 3′ ss | BIN1 5′ ss 4 | 1, 2, 4 | 0.2015 | 0.49175 | 0.54575 | 0.0225 | 0.0495 | 0.06075 | 184 |
| 79 | BIN1 3′ ss | BIN1 5′ ss 4 | 1, 2, 3 | 0.17375 | 0.512 | 0.5245 | 0.018 | 0.02425 | 0.04725 | 185 |
| 80 | BIN1 3′ ss | BIN1 5′ ss 4 | 1, 2, 3, 4 | 0.17 | 0.5355 | 0.337 | 0.0275 | 0.085 | 0.01975 | 186 |
| 81 | BIN1 3′ ss | BIN1 5′ ss 5 | None | 0.17 | 0.4725 | 0.51325 | 0.017 | 0.02225 | 0.01675 | 187 |
| 82 | BIN1 3′ ss | BIN1 5′ ss 5 | 4 | 0.2395 | 0.47925 | 0.50775 | 0.02175 | 0.014 | 0.019 | 188 |
| 83 | BIN1 3′ ss | BIN1 5′ ss 5 | 3 | 0.167 | 0.548 | 0.333 | 0.0145 | 0.036 | 0.031 | 189 |
| 84 | BIN1 3′ ss | BIN1 5′ ss 5 | 3, 4 | 0.23325 | 0.44375 | 0.491 | 0.0145 | 0.04175 | 0.011 | 190 |
| 85 | BIN1 3′ ss | BIN1 5′ ss 5 | 2 | 0.1425 | 0.3805 | 0.48225 | 0.009 | 0.00725 | 0.021 | 191 |
| 86 | BIN1 3′ ss | BIN1 5′ ss 5 | 2, 4 | 0.15425 | 0.4395 | 0.41275 | 0.01825 | 0.03825 | 0.12775 | 192 |
| 87 | BIN1 3′ ss | BIN1 5′ ss 5 | 2, 3 | 0.15125 | 0.39975 | 0.37475 | 0.0135 | 0.012 | 0.01075 | 193 |
| 88 | BIN1 3′ ss | BIN1 5′ ss 5 | 2, 3, 4 | 0.14375 | 0.396 | 0.41175 | 0.0115 | 0.014 | 0.034 | 194 |
| 89 | BIN1 3′ ss | BIN1 5′ ss 5 | 1 | 0.18325 | 0.44375 | 0.43525 | 0.02025 | 0.03925 | 0.10725 | 195 |
| 90 | BIN1 3′ ss | BIN1 5′ ss 5 | 1, 4 | 0.256 | 0.45675 | 0.59375 | 0.0195 | 0.03225 | 0.03175 | 196 |
| 91 | BIN1 3′ ss | BIN1 5′ ss 5 | 1, 3 | 0.23325 | 0.53275 | 0.50925 | 0.01875 | 0.03225 | 0.06375 | 197 |
| 92 | BIN1 3′ ss | BIN1 5′ ss 5 | 1, 3, 4 | 0.2325 | 0.39625 | 0.43625 | 0.01475 | 0.01175 | 0.025 | 198 |
| 93 | BIN1 3′ ss | BIN1 5′ ss 5 | 1, 2 | ND | ND | ND | 0.01025 | 0.00425 | 0.007 | 199 |
| 94 | BIN1 3′ ss | BIN1 5′ ss 5 | 1, 2, 4 | 0.13575 | 0.4355 | 0.388 | 0.01925 | 0.03875 | 0.142 | 200 |
| 95 | BIN1 3′ ss | BIN1 5′ ss 5 | 1, 2, 3 | 0.1185 | 0.34775 | 0.39975 | 0.0135 | 0.054 | 0.036 | 201 |
| 96 | BIN1 3′ ss | BIN1 5′ ss 5 | 1, 2, 3, 4 | 0.15425 | 0.44525 | 0.40675 | 0.01075 | 0.01125 | 0.0065 | 202 |
| 97 | BIN1 3′ ss 1 | Compensated | None | 0.43725 | 0.786 | 0.69575 | 0.0495 | 0.053 | 0.0565 | 203 |
| 98 | BIN1 3′ ss 1 | Compensated | 4 | 0.4675 | 0.75975 | 0.65775 | 0.0695 | 0.193 | 0.366 | 204 |
| 99 | BIN1 3′ ss 1 | Compensated | 3 | 0.46025 | 0.74575 | 0.82025 | 0.12225 | 0.0545 | 0.314 | 205 |
| 100 | BIN1 3′ ss 1 | Compensated | 3, 4 | 0.57525 | 0.78675 | 0.8045 | 0.07875 | 0.2075 | 0.06375 | 206 |
| 101 | BIN1 3′ ss 1 | Compensated | 2 | 0.38725 | 0.72125 | 0.64 | 0.042 | 0.16275 | 0.08925 | 207 |
| 102 | BIN1 3′ ss 1 | Compensated | 2, 4 | 0.433 | 0.648 | 0.73875 | 0.07175 | 0.22675 | 0.05125 | 208 |
| 103 | BIN1 3′ ss 1 | Compensated | 2, 3 | 0.36725 | 0.724 | 0.491 | 0.08125 | 0.14275 | 0.1815 | 209 |
| 104 | BIN1 3′ ss 1 | Compensated | 2, 3, 4 | 0.52725 | 0.76 | 0.84175 | 0.094 | 0.1485 | 0.301 | 210 |
| 105 | BIN1 3′ ss 1 | Compensated | 1 | 0.5 | 0.739 | 0.6785 | 0.07125 | 0.25825 | 0.2725 | 211 |
| 106 | BIN1 3′ ss 1 | Compensated | 1, 4 | 0.57475 | 0.74125 | 0.855 | 0.11375 | 0.07175 | 0.09625 | 212 |
| 107 | BIN1 3′ ss 1 | Compensated | 1, 3 | 0.51875 | 0.7765 | 0.74725 | 0.08275 | 0.32525 | 0.114 | 213 |
| 108 | BIN1 3′ ss 1 | Compensated | 1, 3, 4 | 0.50175 | 0.62025 | 0.76425 | 0.14625 | 0.26625 | 0.12825 | 214 |
| 109 | BIN1 3′ ss 1 | Compensated | 1, 2 | 0.56525 | 0.85525 | 0.67775 | 0.0995 | 0.15975 | 0.39 | 215 |
| 110 | BIN1 3′ ss 1 | Compensated | 1, 2, 4 | 0.47575 | 0.76575 | 0.86275 | 0.104 | 0.287 | 0.1315 | 216 |
| 111 | BIN1 3′ ss 1 | Compensated | 1, 2, 3 | 0.52275 | 0.7575 | 0.7185 | 0.08425 | 0.2305 | 0.20425 | 217 |
| 112 | BIN1 3′ ss 1 | Compensated | 1, 2, 3, 4 | 0.6245 | 0.795 | 0.84475 | 0.111 | 0.2005 | 0.1635 | 218 |
| 113 | BIN1 3′ ss 1 | BIN1 5′ ss 1 | None | 0.484 | 0.71175 | 0.64525 | 0.1715 | 0.04175 | 0.0825 | 219 |
| 114 | BIN1 3′ ss 1 | BIN1 5′ ss 1 | 4 | 0.62375 | 0.805 | 0.8095 | 0.149 | 0.19775 | 0.17875 | 220 |
| 115 | BIN1 3′ ss 1 | BIN1 5′ ss 1 | 3 | 0.66175 | 0.83025 | 0.87875 | 0.168 | 0.24525 | 0.23075 | 221 |
| 116 | BIN1 3′ ss 1 | BIN1 5′ ss 1 | 3, 4 | 0.677 | 0.85425 | 0.83375 | 0.206 | 0.18175 | 0.11175 | 222 |
| 117 | BIN1 3′ ss 1 | BIN1 5′ ss 1 | 2 | 0.56975 | 0.781 | 0.8175 | 0.1155 | 0.18325 | 0.39675 | 223 |
| 118 | BIN1 3′ ss 1 | BIN1 5′ ss 1 | 2, 4 | 0.578 | 0.789 | 0.68175 | 0.13375 | 0.2405 | 0.20525 | 224 |
| 119 | BIN1 3′ ss 1 | BIN1 5′ ss 1 | 2, 3 | 0.6865 | 0.86175 | 0.87 | 0.20125 | 0.29525 | 0.33 | 225 |
| 120 | BIN1 3′ ss 1 | BIN1 5′ ss | 2, 3, 4 | 0.70275 | 0.85425 | 0.8515 | 0.22425 | 0.18475 | 0.2335 | 226 |
| 121 | BIN1 3′ ss 1 | BIN1 5′ ss 1 | 1 | 0.67675 | 0.85325 | 0.85625 | 0.14525 | 0.25075 | 0.108 | 227 |
| 122 | BIN1 3′ ss 1 | BIN1 5′ ss 1 | 1, 4 | 0.6975 | 0.82875 | 0.83625 | 0.2 | 0.21925 | 0.3565 | 228 |
| 123 | BIN1 3′ ss 1 | BIN1 5′ ss 1 | 1, 3 | 0.71825 | 0.8615 | 0.8565 | 0.21175 | 0.2795 | 0.22575 | 229 |
| 124 | BIN1 3′ ss 1 | BIN1 5′ ss 1 | 1, 3, 4 | 0.7845 | 0.89025 | 0.8985 | 0.2345 | 0.266 | 0.1455 | 230 |
| 125 | BIN1 3′ ss 1 | BIN1 5′ ss 1 | 1, 2 | 0.64275 | 0.8745 | 0.74175 | 0.191 | 0.1865 | 0.15 | 231 |
| 126 | BIN1 3′ ss 1 | BIN1 5′ ss 1 | 1, 2, 4 | 0.626 | 0.86425 | 0.76925 | 0.25475 | 0.545333333 | 0.573666667 | 232 |
| 127 | BIN1 3′ ss 1 | BIN1 5′ ss 1 | 1, 2, 3 | 0.69325 | 0.8435 | 0.846 | 0.1775 | 0.33175 | 0.4265 | 233 |
| 128 | BIN1 3′ ss 1 | BIN1 5′ ss 1 | 1, 2, 3, 4 | 0.71475 | 0.79475 | 0.815 | 0.1595 | 0.147 | 0.1605 | 234 |
| 129 | BIN1 3′ ss 1 | BIN1 5′ ss 2 | None | 0.3525 | 0.71125 | 0.74075 | 0.03925 | 0.10675 | 0.05225 | 235 |
| 130 | BIN1 3′ ss 1 | BIN1 5′ ss 2 | 4 | 0.39425 | 0.703 | 0.69675 | 0.058 | 0.09475 | 0.219 | 236 |
| 131 | BIN1 3′ ss 1 | BIN1 5′ ss 2 | 3 | 0.403 | 0.748 | 0.7475 | 0.057 | 0.08625 | 0.114 | 237 |
| 132 | BIN1 3′ ss 1 | BIN1 5′ ss 2 | 3, 4 | 0.5045 | 0.7365 | 0.74425 | 0.075 | 0.15 | 0.08875 | 238 |
| 133 | BIN1 3′ ss 1 | BIN1 5′ ss 2 | 2 | 0.34225 | 0.71075 | 0.653 | 0.04575 | 0.1305 | 0.12525 | 239 |
| 134 | BIN1 3′ ss 1 | BIN1 5′ ss 2 | 2, 4 | 0.31525 | 0.60475 | 0.5855 | 0.052 | 0.101 | 0.1585 | 240 |
| 135 | BIN1 3′ ss 1 | BIN1 5′ ss 2 | 2, 3 | 0.34075 | 0.77425 | 0.73725 | 0.04725 | 0.19825 | 0.088 | 241 |
| 136 | BIN1 3′ ss 1 | BIN1 5′ ss 2 | 2, 3, 4 | 0.47325 | 0.7045 | 0.73325 | 0.0645 | 0.16825 | 0.07775 | 242 |
| 137 | BIN1 3′ ss 1 | BIN1 5′ ss 2 | 1 | 0.41525 | 0.77325 | 0.691 | 0.06975 | 0.216 | 0.119 | 243 |
| 138 | BIN1 3′ ss 1 | BIN1 5′ ss 2 | 1, 4 | 0.49725 | 0.7735 | 0.7935 | 0.0865 | 0.13525 | 0.2075 | 244 |
| 139 | BIN1 3′ ss 1 | BIN1 5′ ss 2 | 1, 3 | 0.4615 | 0.74375 | 0.749 | 0.08075 | 0.19575 | 0.0615 | 245 |
| 140 | BIN1 3′ ss 1 | BIN1 5′ ss 2 | 1, 3, 4 | 0.4655 | 0.69925 | 0.76425 | 0.085 | 0.246 | 0.153 | 246 |
| 141 | BIN1 3′ ss 1 | BIN1 5′ ss 2 | 1, 2 | 0.40175 | 0.7775 | 0.68425 | 0.052 | 0.1045 | 0.10075 | 247 |
| 142 | BIN1 3′ ss 1 | BIN1 5′ ss 2 | 1, 2, 4 | 0.4115 | 0.76075 | 0.7365 | 0.079 | 0.27775 | 0.10975 | 248 |
| 143 | BIN1 3′ ss 1 | BIN1 5′ ss 2 | 1, 2, 3 | 0.4705 | 0.808 | 0.82875 | 0.04375 | 0.14325 | 0.1445 | 249 |
| 144 | BIN1 3′ ss 1 | BIN1 5′ ss 2 | 1, 2, 3, 4 | 0.548 | 0.87675 | 0.66925 | 0.08775 | 0.10275 | 0.181 | 250 |
| 145 | BIN1 3′ ss 1 | BIN1 5′ ss 3 | None | 0.355 | 0.57775 | 0.686 | 0.06575 | 0.114 | 0.14175 | 251 |
| 146 | BIN1 3′ ss 1 | BIN1 5′ ss 3 | 4 | 0.40425 | 0.695 | 0.63925 | 0.06125 | 0.039 | 0.0855 | 252 |
| 147 | BIN1 3′ ss 1 | BIN1 5′ ss 3 | 3 | 0.44725 | 0.7505 | 0.727 | 0.0555 | 0.17125 | 0.21025 | 253 |
| 148 | BIN1 3′ ss 1 | BIN1 5′ ss 3 | 3, 4 | 0.4375 | 0.69425 | 0.60025 | 0.0835 | 0.1375 | 0.0875 | 254 |
| 149 | BIN1 3′ ss 1 | BIN1 5′ ss 3 | 2 | 0.3835 | 0.73775 | 0.71375 | 0.0385 | 0.04825 | 0.17675 | 255 |
| 150 | BIN1 3′ ss 1 | BIN1 5′ ss 3 | 2, 4 | 0.3975 | 0.6575 | 0.7285 | 0.058 | 0.09975 | 0.135 | 256 |
| 151 | BIN1 3′ ss 1 | BIN1 5′ ss 3 | 2, 3 | 0.33075 | 0.6775 | 0.6735 | 0.03975 | 0.273 | 0.052 | 257 |
| 152 | BIN1 3′ ss 1 | BIN1 5′ ss 3 | 2, 3, 4 | 0.509 | 0.67225 | 0.69875 | 0.066 | 0.126 | 0.08425 | 258 |
| 153 | BIN1 3′ ss 1 | BIN1 5′ ss 3 | 1 | 0.44375 | 0.70925 | 0.69925 | 0.0655 | 0.13375 | 0.1345 | 259 |
| 154 | BIN1 3′ ss 1 | BIN1 5′ ss 3 | 1, 4 | 0.49475 | 0.7025 | 0.73925 | 0.06625 | 0.102 | 0.0665 | 260 |
| 155 | BIN1 3′ ss 1 | BIN1 5′ ss 3 | 1, 3 | 0.49175 | 0.6745 | 0.76475 | 0.08725 | 0.101 | 0.222 | 261 |
| 156 | BIN1 3′ ss 1 | BIN1 5′ ss 3 | 1, 3, 4 | 0.49925 | 0.71675 | 0.769 | 0.1155 | 0.21275 | 0.1745 | 262 |
| 157 | BIN1 3′ ss 1 | BIN1 5′ ss 3 | 1, 2 | 0.49075 | 0.8445 | 0.61425 | 0.0745 | 0.25525 | 0.068 | 263 |
| 158 | BIN1 3′ ss 1 | BIN1 5′ ss 3 | 1, 2, 4 | 0.39225 | 0.62725 | 0.6535 | 0.06725 | 0.17275 | 0.13125 | 264 |
| 159 | BIN1 3′ ss 1 | BIN1 5′ ss 3 | 1, 2, 3 | 0.40325 | 0.71375 | 0.7035 | 0.05425 | 0.236 | 0.1505 | 265 |
| 160 | BIN1 3′ ss 1 | BIN1 5′ ss 3 | 1, 2, 3, 4 | 0.59 | 0.822 | 0.81675 | 0.054 | 0.0795 | 0.0355 | 266 |
| 161 | BIN1 3′ ss 1 | BIN1 5′ ss 4 | None | 0.2885 | 0.6205 | 0.60025 | 0.03325 | 0.0455 | 0.0595 | 267 |
| 162 | BIN1 3′ ss 1 | BIN1 5′ ss 4 | 4 | 0.30275 | 0.574 | 0.503 | 0.04775 | 0.08725 | 0.0275 | 268 |
| 163 | BIN1 3′ ss 1 | BIN1 5′ ss 4 | 3 | 0.26975 | 0.61175 | 0.59675 | 0.0275 | 0.13775 | 0.05025 | 269 |
| 164 | BIN1 3′ ss 1 | BIN1 5′ ss 4 | 3, 4 | 0.39025 | 0.64575 | 0.65325 | 0.06275 | 0.12025 | 0.08775 | 270 |
| 165 | BIN1 3′ ss 1 | BIN1 5′ ss 4 | 2 | 0.27225 | 0.58775 | 0.571 | 0.02175 | 0.08625 | 0.0745 | 271 |
| 166 | BIN1 3′ ss 1 | BIN1 5′ ss 4 | 2, 4 | 0.29875 | 0.6475 | 0.611 | 0.0335 | 0.055 | 0.0145 | 272 |
| 167 | BIN1 3′ ss 1 | BIN1 5′ ss 4 | 2, 3 | 0.20225 | 0.54625 | 0.503 | 0.03375 | 0.17 | 0.10175 | 273 |
| 168 | BIN1 3′ ss 1 | BIN1 5′ ss 4 | 2, 3, 4 | 0.3425 | 0.63175 | 0.59675 | 0.04275 | 0.13675 | 0.0945 | 274 |
| 169 | BIN1 3′ ss 1 | BIN1 5′ ss 4 | 1 | 0.31325 | 0.63375 | 0.67575 | 0.045 | 0.13725 | 0.1195 | 275 |
| 170 | BIN1 3′ ss 1 | BIN1 5′ ss 4 | 1, 4 | 0.35525 | 0.59725 | 0.64625 | 0.05625 | 0.17825 | 0.0885 | 276 |
| 171 | BIN1 3′ ss 1 | BIN1 5′ ss 4 | 1, 3 | 0.429 | 0.696 | 0.7905 | 0.0545 | 0.22325 | 0.0705 | 277 |
| 172 | BIN1 3′ ss 1 | BIN1 5′ ss 4 | 1, 3, 4 | 0.4785 | 0.70725 | 0.715 | 0.069 | 0.17575 | 0.17025 | 278 |
| 173 | BIN1 3′ ss 1 | BIN1 5′ ss 4 | 1, 2 | 0.2855 | 0.6385 | 0.6785 | 0.03875 | 0.0385 | 0.0945 | 279 |
| 174 | BIN1 3′ ss 1 | BIN1 5′ ss 4 | 1, 2, 4 | 0.31325 | 0.66275 | 0.63675 | 0.05675 | 0.1125 | 0.067 | 280 |
| 175 | BIN1 3′ ss 1 | BIN1 5′ ss 4 | 1, 2, 3 | 0.305 | 0.72275 | 0.6155 | 0.05975 | 0.23475 | 0.1755 | 281 |
| 176 | BIN1 3′ ss 1 | BIN1 5′ ss 4 | 1, 2, 3, 4 | 0.4185 | 0.69525 | 0.68775 | 0.038 | 0.0525 | 0.0525 | 282 |
| 177 | BIN1 3′ ss 1 | BIN1 5′ ss 5 | None | 0.21 | 0.45575 | 0.46175 | 0.01475 | 0.037 | 0.13675 | 283 |
| 178 | BIN1 3′ ss 1 | BIN1 5′ ss 5 | 4 | 0.2845 | 0.59875 | 0.48525 | 0.0265 | 0.04525 | 0.013 | 284 |
| 179 | BIN1 3′ ss 1 | BIN1 5′ ss 5 | 3 | 0.224 | 0.53525 | 0.49025 | 0.02575 | 0.059 | 0.03925 | 285 |
| 180 | BIN1 3′ ss 1 | BIN1 5′ ss 5 | 3, 4 | 0.338 | 0.645 | 0.504 | 0.0425 | 0.068 | 0.158 | 286 |
| 181 | BIN1 3′ ss 1 | BIN1 5′ ss 5 | 2 | 0.17525 | 0.575 | 0.553 | 0.01775 | 0.1015 | 0.09225 | 287 |
| 182 | BIN1 3′ ss 1 | BIN1 5′ ss 5 | 2, 4 | 0.1705 | 0.569 | 0.486 | 0.019 | 0.116 | 0.04725 | 288 |
| 183 | BIN1 3′ ss 1 | BIN1 5′ ss 5 | 2, 3 | 0.13425 | 0.56025 | 0.50575 | 0.0175 | 0.064 | 0.02675 | 289 |
| 184 | BIN1 3′ ss 1 | BIN1 5′ ss 5 | 2, 3, 4 | 0.21925 | 0.57875 | 0.59475 | 0.0185 | 0.042 | 0.0215 | 290 |
| 185 | BIN1 3′ ss 1 | BIN1 5′ ss 5 | 1 | 0.2435 | 0.6355 | 0.72925 | 0.01875 | 0.0305 | 0.0375 | 291 |
| 186 | BIN1 3′ ss 1 | BIN1 5′ ss 5 | 1, 4 | 0.32075 | 0.64325 | 0.579 | 0.0335 | 0.0645 | 0.02125 | 292 |
| 187 | BIN1 3′ ss 1 | BIN1 5′ ss 5 | 1, 3 | 0.34075 | 0.606 | 0.72625 | 0.0285 | 0.0365 | 0.05975 | 293 |
| 188 | BIN1 3′ ss 1 | BIN1 5′ ss 5 | 1, 3, 4 | 0.41475 | 0.632 | 0.6655 | 0.04225 | 0.14875 | 0.083 | 294 |
| 189 | BIN1 3′ ss 1 | BIN1 5′ ss 5 | 1, 2 | 0.1795 | 0.54125 | 0.54875 | 0.02225 | 0.02225 | 0.0545 | 295 |
| 190 | BIN1 3′ ss 1 | BIN1 5′ ss 5 | 1, 2, 4 | 0.2505 | 0.6065 | 0.58125 | ND | ND | ND | 296 |
| 191 | BIN1 3′ ss 1 | BIN1 5′ ss 5 | 1, 2, 3 | 0.16975 | 0.50825 | 0.506 | 0.013 | 0.04375 | 0.22075 | 297 |
| 192 | BIN1 3′ ss 1 | BIN1 5′ ss 5 | 1, 2, 3, 4 | 0.3175 | 0.54425 | 0.68025 | ND | ND | ND | 298 |
| 193 | BIN1 3′ ss 2 | Compensated | None | 0.2365 | 0.497 | 0.4785 | 0.0225 | 0.0335 | 0.031 | 299 |
| 194 | BIN1 3′ ss 2 | Compensated | 4 | 0.2795 | 0.59775 | 0.5505 | 0.0255 | 0.024 | 0.0045 | 300 |
| 195 | BIN1 3′ ss 2 | Compensated | 3 | 0.27975 | 0.64275 | 0.637 | 0.0255 | 0.06575 | 0.0925 | 301 |
| 196 | BIN1 3′ ss 2 | Compensated | 3, 4 | 0.229 | 0.483 | 0.39025 | 0.03325 | 0.1235 | 0.03775 | 302 |
| 197 | BIN1 3′ ss 2 | Compensated | 2 | 0.1945 | 0.56775 | 0.50725 | 0.02575 | 0.13 | 0.021 | 303 |
| 198 | BIN1 3′ ss 2 | Compensated | 2, 4 | 0.21975 | 0.45775 | 0.65025 | 0.0225 | 0.05925 | 0.1095 | 304 |
| 199 | BIN1 3′ ss 2 | Compensated | 2, 3 | 0.17475 | 0.56575 | 0.61625 | 0.018 | 0.03325 | 0.055 | 305 |
| 200 | BIN1 3′ ss 2 | Compensated | 2, 3, 4 | 0.255 | 0.667 | 0.48075 | 0.02825 | 0.0295 | 0.0615 | 306 |
| 201 | BIN1 3′ ss 2 | Compensated | 1 | 0.26525 | 0.56725 | 0.646 | 0.024 | 0.04725 | 0.0355 | 307 |
| 202 | BIN1 3′ ss 2 | Compensated | 1, 4 | 0.306 | 0.64925 | 0.55225 | 0.03025 | 0.033 | 0.0825 | 308 |
| 203 | BIN1 3′ ss 2 | Compensated | 1, 3 | 0.2785 | 0.604 | 0.6515 | 0.0235 | 0.17025 | 0.027 | 309 |
| 204 | BIN1 3′ ss 2 | Compensated | 1, 3, 4 | 0.23375 | 0.53225 | 0.48875 | 0.036 | 0.06475 | 0.14025 | 310 |
| 205 | BIN1 3′ ss 2 | Compensated | 1, 2 | 0.169 | 0.48625 | 0.46575 | 0.0175 | 0.02375 | 0.0445 | 311 |
| 206 | BIN1 3′ ss 2 | Compensated | 1, 2, 4 | 0.2625 | 0.60375 | 0.46825 | 0.03325 | 0.04725 | 0.06975 | 312 |
| 207 | BIN1 3′ ss 2 | Compensated | 1, 2, 3 | 0.22825 | 0.60325 | 0.6235 | 0.0235 | 0.10325 | 0.0825 | 313 |
| 208 | BIN1 3′ ss 2 | Compensated | 1, 2, 3, 4 | 0.2865 | 0.6965 | 0.6075 | 0.033 | 0.0275 | 0.08625 | 314 |
| 209 | BIN1 3′ ss 2 | BIN1 5′ ss 1 | None | 0.2145 | 0.566 | 0.538 | 0.04675 | 0.13825 | 0.11875 | 315 |
| 210 | BIN1 3′ ss 2 | BIN1 5′ ss 1 | 4 | 0.41775 | 0.708 | 0.706 | 0.05775 | 0.1225 | 0.10225 | 316 |
| 211 | BIN1 3′ ss 2 | BIN1 5′ ss 1 | 3 | 0.369 | 0.64275 | 0.636 | 0.08875 | 0.19025 | 0.15425 | 317 |
| 212 | BIN1 3′ ss 2 | BIN1 5′ ss 1 | 3, 4 | 0.5575 | 0.73625 | 0.78425 | 0.085 | 0.2525 | 0.1065 | 318 |
| 213 | BIN1 3′ ss 2 | BIN1 5′ ss 1 | 2 | 0.32225 | 0.77225 | 0.638 | 0.0435 | 0.12275 | 0.082 | 319 |
| 214 | BIN1 3′ ss 2 | BIN1 5′ ss 1 | 2, 4 | 0.401 | 0.726 | 0.7815 | 0.05825 | 0.16225 | 0.10975 | 320 |
| 215 | BIN1 3′ ss 2 | BIN1 5′ ss 1 | 2, 3 | 0.3575 | 0.77175 | 0.72475 | 0.057 | 0.08875 | 0.21175 | 321 |
| 216 | BIN1 3′ ss 2 | BIN1 5′ ss 1 | 2, 3, 4 | 0.423 | 0.6915 | 0.77475 | 0.0845 | 0.212 | 0.0715 | 322 |
| 217 | BIN1 3′ ss 2 | BIN1 5′ ss 1 | 1 | 0.417 | 0.7905 | 0.74175 | 0.07825 | 0.58675 | 0.2045 | 323 |
| 218 | BIN1 3′ ss 2 | BIN1 5′ ss 1 | 1, 4 | 0.50425 | 0.7745 | 0.8395 | 0.106 | 0.25525 | 0.3215 | 324 |
| 219 | BIN1 3′ ss 2 | BIN1 5′ ss 1 | 1, 3 | 0.557 | 0.8265 | 0.7505 | 0.1035 | 0.23 | 0.194 | 325 |
| 220 | BIN1 3′ ss 2 | BIN1 5′ ss 1 | 1, 3, 4 | 0.52425 | 0.789 | 0.73625 | 0.1325 | 0.5445 | 0.126 | 326 |
| 221 | BIN1 3′ ss 2 | BIN1 5′ ss 1 | 1, 2 | 0.40825 | 0.80125 | 0.738 | 0.0615 | 0.2335 | 0.106 | 327 |
| 222 | BIN1 3′ ss 2 | BIN1 5′ ss 1 | 1, 2, 4 | 0.5445 | 0.832 | 0.82375 | 0.08875 | 0.07975 | 0.513 | 328 |
| 223 | BIN1 3′ ss 2 | BIN1 5′ ss 1 | 1, 2, 3 | 0.4365 | 0.89225 | 0.871 | 0.097 | 0.3415 | 0.25675 | 329 |
| 224 | BIN1 3′ ss 2 | BIN1 5′ ss 1 | 1, 2, 3, 4 | 0.551 | 0.7825 | 0.811 | 0.056 | 0.09475 | 0.13625 | 330 |
| 225 | BIN1 3′ ss 2 | BIN1 5′ ss 2 | None | 0.20025 | 0.55475 | 0.622 | 0.019 | 0.052 | 0.120333333 | 331 |
| 226 | BIN1 3′ ss 2 | BIN1 5′ ss 2 | 4 | 0.20225 | 0.54075 | 0.58 | 0.02825 | 0.05875 | 0.07625 | 332 |
| 227 | BIN1 3′ ss 2 | BIN1 5′ ss 2 | 3 | 0.1715 | 0.53675 | 0.56275 | 0.01625 | 0.0755 | 0.17625 | 333 |
| 228 | BIN1 3′ ss 2 | BIN1 5′ ss 2 | 3, 4 | 0.241 | 0.5605 | 0.68875 | 0.03025 | 0.0475 | 0.08025 | 334 |
| 229 | BIN1 3′ ss 2 | BIN1 5′ ss 2 | 2 | 0.14475 | 0.5525 | 0.59 | 0.019 | 0.10525 | 0.06875 | 335 |
| 230 | BIN1 3′ ss 2 | BIN1 5′ ss 2 | 2, 4 | 0.15875 | 0.5465 | 0.43225 | 0.01875 | 0.02275 | 0.0485 | 336 |
| 231 | BIN1 3′ ss 2 | BIN1 5′ ss 2 | 2, 3 | 0.11275 | 0.49575 | 0.51025 | 0.016 | 0.0605 | 0.102 | 337 |
| 232 | BIN1 3′ ss 2 | BIN1 5′ ss 2 | 2, 3, 4 | 0.20075 | 0.60725 | 0.5005 | 0.021 | 0.08925 | 0.04175 | 338 |
| 233 | BIN1 3′ ss 2 | BIN1 5′ ss 2 | 1 | 0.19975 | 0.58275 | 0.49225 | 0.0195 | 0.0615 | 0.03625 | 339 |
| 234 | BIN1 3′ ss 2 | BIN1 5′ ss 2 | 1, 4 | 0.22725 | 0.61225 | 0.5195 | 0.0285 | 0.0535 | 0.09975 | 340 |
| 235 | BIN1 3′ ss 2 | BIN1 5′ ss 2 | 1, 3 | 0.2385 | 0.591 | 0.7225 | 0.02525 | 0.10025 | 0.077 | 341 |
| 236 | BIN1 3′ ss 2 | BIN1 5′ ss 2 | 1, 3, 4 | 0.22225 | 0.5415 | 0.60325 | 0.04 | 0.078 | 0.1725 | 342 |
| 237 | BIN1 3′ ss 2 | BIN1 5′ ss 2 | 1, 2 | 0.16775 | 0.564 | 0.64925 | 0.0205 | 0.0845 | 0.06 | 343 |
| 238 | BIN1 3′ ss 2 | BIN1 5′ ss 2 | 1, 2, 4 | 0.1775 | 0.512 | 0.513 | 0.033 | 0.06 | 0.01725 | 344 |
| 239 | BIN1 3′ ss 2 | BIN1 5′ ss 2 | 1, 2, 3 | 0.1985 | 0.632 | 0.7475 | 0.018 | 0.039 | 0.0435 | 345 |
| 240 | BIN1 3′ ss 2 | BIN1 5′ ss 2 | 1, 2, 3, 4 | ND | ND | ND | 0.03675 | 0.114 | 0.11925 | 346 |
| 241 | BIN1 3′ ss 2 | BIN1 5′ ss 3 | None | 0.225 | 0.5215 | 0.5345 | 0.01825 | 0.0205 | 0.029 | 347 |
| 242 | BIN1 3′ ss 2 | BIN1 5′ ss 3 | 4 | 0.2435 | 0.53125 | 0.5045 | 0.02825 | 0.037 | 0.027 | 348 |
| 243 | BIN1 3′ ss 2 | BIN1 5′ ss 3 | 3 | 0.2445 | 0.594 | 0.542 | 0.02375 | 0.0625 | 0.0555 | 349 |
| 244 | BIN1 3′ ss 2 | BIN1 5′ ss 3 | 3, 4 | 0.23025 | 0.53875 | 0.482 | 0.029 | 0.0375 | 0.09475 | 350 |
| 245 | BIN1 3′ ss 2 | BIN1 5′ ss 3 | 2 | 0.188 | 0.5165 | 0.57325 | 0.0175 | 0.063 | 0.05775 | 351 |
| 246 | BIN1 3′ ss 2 | BIN1 5′ ss 3 | 2, 4 | 0.219 | 0.53875 | 0.50825 | 0.026 | 0.04575 | 0.065 | 352 |
| 247 | BIN1 3′ ss 2 | BIN1 5′ ss 3 | 2, 3 | 0.17575 | 0.528 | 0.55075 | 0.01725 | 0.03225 | 0.01875 | 353 |
| 248 | BIN1 3′ ss 2 | BIN1 5′ ss 3 | 2, 3, 4 | 0.211 | 0.45725 | 0.49375 | 0.02625 | 0.03975 | 0.036 | 354 |
| 249 | BIN1 3′ ss 2 | BIN1 5′ ss 3 | 1 | 0.2775 | 0.582 | 0.62475 | 0.026 | 0.035333333 | 0.023 | 355 |
| 250 | BIN1 3′ ss 2 | BIN1 5′ ss 3 | 1, 4 | 0.2455 | 0.53875 | 0.63875 | 0.03425 | 0.082 | 0.08875 | 356 |
| 251 | BIN1 3′ ss 2 | BIN1 5′ ss 3 | 1, 3 | 0.228 | 0.51625 | 0.5525 | 0.031 | 0.0225 | 0.02475 | 357 |
| 252 | BIN1 3′ ss 2 | BIN1 5′ ss 3 | 1, 3, 4 | 0.2385 | 0.51175 | 0.5585 | 0.03475 | 0.06425 | 0.05175 | 358 |
| 253 | BIN1 3′ ss 2 | BIN1 5′ ss 3 | 1, 2 | 0.1935 | 0.60975 | 0.58375 | 0.015 | 0.07375 | 0.01925 | 359 |
| 254 | BIN1 3′ ss 2 | BIN1 5′ ss 3 | 1, 2, 4 | 0.18725 | 0.405 | 0.5965 | 0.03175 | 0.1155 | 0.09775 | 360 |
| 255 | BIN1 3′ ss 2 | BIN1 5′ ss 3 | 1, 2, 3 | 0.23525 | 0.617 | 0.602 | 0.024 | 0.048 | 0.02075 | 361 |
| 256 | BIN1 3′ ss 2 | BIN1 5′ ss 3 | 1, 2, 3, 4 | 0.21225 | 0.52375 | 0.559 | 0.02 | 0.0195 | 0.0105 | 362 |
| 257 | BIN1 3′ ss 2 | BIN1 5′ ss 4 | None | 0.172 | 0.45325 | 0.50475 | 0.022 | 0.008 | 0.01 | 363 |
| 258 | BIN1 3′ ss 2 | BIN1 5′ ss 4 | 4 | 0.20375 | 0.6005 | 0.54375 | 0.02625 | 0.05525 | 0.074 | 364 |
| 259 | BIN1 3′ ss 2 | BIN1 5′ ss 4 | 3 | 0.17575 | 0.55775 | 0.51475 | 0.00775 | 0.061 | 0.01025 | 365 |
| 260 | BIN1 3′ ss 2 | BIN1 5′ ss 4 | 3, 4 | 0.19225 | 0.486 | 0.438 | 0.025 | 0.0345 | 0.03675 | 366 |
| 261 | BIN1 3′ ss 2 | BIN1 5′ ss 4 | 2 | 0.1805 | 0.4355 | 0.37025 | 0.0145 | 0.04525 | 0.0795 | 367 |
| 262 | BIN1 3′ ss 2 | BIN1 5′ ss 4 | 2, 4 | 0.15325 | 0.426 | 0.38925 | 0.01775 | 0.045 | 0.054 | 368 |
| 263 | BIN1 3′ ss 2 | BIN1 5′ ss 4 | 2, 3 | 0.1 | 0.335 | 0.3005 | 0.013 | 0.0165 | 0.003 | 369 |
| 264 | BIN1 3′ ss 2 | BIN1 5′ ss 4 | 2, 3, 4 | 0.1695 | 0.44825 | 0.37975 | 0.0215 | 0.0305 | 0.03925 | 370 |
| 265 | BIN1 3′ ss 2 | BIN1 5′ ss 4 | 1 | 0.201 | 0.539 | 0.52425 | 0.0185 | 0.0595 | 0.0445 | 371 |
| 266 | BIN1 3′ ss 2 | BIN1 5′ ss 4 | 1, 4 | 0.22525 | 0.50575 | 0.53425 | 0.0235 | 0.021 | 0.054 | 372 |
| 267 | BIN1 3′ ss 2 | BIN1 5′ ss 4 | 1, 3 | 0.20625 | 0.549 | 0.551 | 0.036 | 0.013 | 0.0415 | 373 |
| 268 | BIN1 3′ ss 2 | BIN1 5′ ss 4 | 1, 3, 4 | 0.22775 | 0.50025 | 0.504 | 0.02625 | 0.0555 | 0.1045 | 374 |
| 269 | BIN1 3′ ss 2 | BIN1 5′ ss 4 | 1, 2 | 0.136 | 0.37175 | 0.459 | 0.02 | 0.05225 | 0.07925 | 375 |
| 270 | BIN1 3′ ss 2 | BIN1 5′ ss 4 | 1, 2, 4 | 0.15275 | 0.404 | 0.38225 | 0.02 | 0.03625 | 0.01725 | 376 |
| 271 | BIN1 3′ ss 2 | BIN1 5′ ss 4 | 1, 2, 3 | 0.14975 | 0.51275 | 0.4445 | 0.01025 | 0.017 | 0.04925 | 377 |
| 272 | BIN1 3′ ss 2 | BIN1 5′ ss 4 | 1, 2, 3, 4 | 0.15675 | 0.423 | 0.44825 | 0.02675 | 0.0365 | 0.034 | 378 |
| 273 | BIN1 3′ ss 2 | BIN1 5′ ss 5 | None | 0.18325 | 0.36175 | 0.464 | 0.026 | 0.0725 | 0.038 | 379 |
| 274 | BIN1 3′ ss 2 | BIN1 5′ ss 5 | 4 | 0.19075 | 0.428 | 0.45725 | 0.01375 | 0.0245 | 0.0135 | 380 |
| 275 | BIN1 3′ ss 2 | BIN1 5′ ss 5 | 3 | 0.14975 | 0.39725 | 0.31525 | ND | ND | ND | 381 |
| 276 | BIN1 3′ ss 2 | BIN1 5′ ss 5 | 3, 4 | 0.15525 | 0.36325 | 0.4015 | 0.018 | 0.05475 | 0.07075 | 382 |
| 277 | BIN1 3′ ss 2 | BIN1 5′ ss 5 | 2 | 0.1375 | 0.35075 | 0.3915 | 0.01775 | 0.03275 | 0.05875 | 383 |
| 278 | BIN1 3′ ss 2 | BIN1 5′ ss 5 | 2, 4 | 0.16275 | 0.376 | 0.47075 | 0.01375 | 0.049 | 0.00075 | 384 |
| 279 | BIN1 3′ ss 2 | BIN1 5′ ss 5 | 2, 3 | 0.1135 | 0.2905 | 0.33525 | 0.01325 | 0.0175 | 0.0065 | 385 |
| 280 | BIN1 3′ ss 2 | BIN1 5′ ss 5 | 2, 3, 4 | 0.1415 | 0.35475 | 0.39325 | 0.0135 | 0.03425 | 0.10425 | 386 |
| 281 | BIN1 3′ ss 2 | BIN1 5′ ss 5 | 1 | 0.15675 | 0.41025 | 0.4085 | 0.0215 | 0.02 | 0.00975 | 387 |
| 282 | BIN1 3′ ss 2 | BIN1 5′ ss 5 | 1, 4 | 0.17875 | 0.43725 | 0.545 | 0.0195 | 0.03975 | 0.12475 | 388 |
| 283 | BIN1 3′ ss 2 | BIN1 5′ ss 5 | 1, 3 | 0.17925 | 0.44325 | 0.41725 | 0.01225 | 0.0125 | 0.0155 | 389 |
| 284 | BIN1 3′ ss 2 | BIN1 5′ ss 5 | 1, 3, 4 | 0.17675 | 0.4345 | 0.318 | 0.01425 | 0.0195 | 0.0075 | 390 |
| 285 | BIN1 3′ ss 2 | BIN1 5′ ss 5 | 1, 2 | 0.10875 | 0.325 | 0.31975 | 0.01 | 0.0105 | 0.0195 | 391 |
| 286 | BIN1 3′ ss 2 | BIN1 5′ ss 5 | 1, 2, 4 | 0.11675 | 0.28175 | 0.34325 | 0.0135 | 0.0615 | 0.00825 | 392 |
| 287 | BIN1 3′ ss 2 | BIN1 5′ ss 5 | 1, 2, 3 | 0.08975 | 0.331 | 0.368 | 0.01 | 0.01825 | 0.013 | 393 |
| 288 | BIN1 3′ ss 2 | BIN1 5′ ss 5 | 1, 2, 3, 4 | 0.11175 | 0.36725 | 0.32225 | 0.01475 | 0.0205 | 0.0105 | 394 |
| 289 | BIN1 3′ ss 3 | Compensated | None | ND | ND | ND | 0.02475 | 0.095666667 | 0 | 395 |
| 290 | BIN1 3′ ss 3 | Compensated | 4 | 0.336 | 0.6205 | 0.662 | 0.0485 | 0.09975 | 0.1135 | 396 |
| 291 | BIN1 3′ ss 3 | Compensated | 3 | 0.259 | 0.60775 | 0.54375 | 0.0505 | 0.062 | 0.04525 | 397 |
| 292 | BIN1 3′ ss 3 | Compensated | 3, 4 | 0.4175 | 0.756 | 0.731 | 0.05825 | 0.084 | 0.1285 | 398 |
| 293 | BIN1 3′ ss 3 | Compensated | 2 | 0.258 | 0.67725 | 0.64875 | 0.037 | 0.07075 | 0.056 | 399 |
| 294 | BIN1 3′ ss 3 | Compensated | 2, 4 | 0.3415 | 0.56125 | 0.714 | 0.05225 | 0.09225 | 0.048 | 400 |
| 295 | BIN1 3′ ss 3 | Compensated | 2, 3 | 0.26675 | 0.747 | 0.714 | 0.0205 | 0.09525 | 0.145 | 401 |
| 296 | BIN1 3′ ss 3 | Compensated | 2, 3, 4 | 0.4195 | 0.70525 | 0.73525 | 0.077 | 0.11175 | 0.09825 | 402 |
| 297 | BIN1 3′ ss 3 | Compensated | 1 | 0.323 | 0.72825 | 0.69475 | 0.06175 | 0.05375 | 0.20475 | 403 |
| 298 | BIN1 3′ ss 3 | Compensated | 1, 4 | 0.387 | 0.6905 | 0.69125 | 0.058 | 0.174 | 0.07575 | 404 |
| 299 | BIN1 3′ ss 3 | Compensated | 1, 3 | 0.4155 | 0.7055 | 0.76375 | 0.05475 | 0.12375 | 0.10225 | 405 |
| 300 | BIN1 3′ ss 3 | Compensated | 1, 3, 4 | 0.41875 | 0.7005 | 0.655 | 0.08425 | 0.099 | 0.059 | 406 |
| 301 | BIN1 3′ ss 3 | Compensated | 1, 2 | 0.29025 | 0.6815 | 0.56525 | 0.042 | 0.1705 | 0.15075 | 407 |
| 302 | BIN1 3′ ss 3 | Compensated | 1, 2, 4 | 0.276 | 0.56625 | 0.646 | 0.07775 | 0.226 | 0.158 | 408 |
| 303 | BIN1 3′ ss 3 | Compensated | 1, 2, 3 | 0.353 | 0.7475 | 0.76025 | ND | ND | ND | 409 |
| 304 | BIN1 3′ ss 3 | Compensated | 1, 2, 3, 4 | 0.3755 | 0.75325 | 0.61425 | 0.05975 | 0.3265 | 0.310333333 | 410 |
| 305 | BIN1 3′ ss 3 | BIN1 5′ ss 1 | None | 0.3765 | 0.69325 | 0.70375 | 0.11525 | 0.288333333 | 0.2175 | 411 |
| 306 | BIN1 3′ ss 3 | BIN1 5′ ss 1 | 4 | 0.481 | 0.7845 | 0.84075 | 0.10975 | 0.25875 | 0.21625 | 412 |
| 307 | BIN1 3′ ss 3 | BIN1 5′ ss 1 | 3 | 0.514 | 0.824 | 0.8435 | 0.101 | 0.332 | 0.166 | 413 |
| 308 | BIN1 3′ ss 3 | BIN1 5′ ss 1 | 3, 4 | 0.59425 | 0.84325 | 0.7985 | 0.12625 | 0.3295 | 0.26375 | 414 |
| 309 | BIN1 3′ ss 3 | BIN1 5′ ss 1 | 2 | 0.434 | 0.72825 | 0.739 | 0.06525 | 0.13975 | 0.0365 | 415 |
| 310 | BIN1 3′ ss 3 | BIN1 5′ ss 1 | 2, 4 | 0.5655 | 0.79175 | 0.79325 | 0.111 | 0.18475 | 0.3355 | 416 |
| 311 | BIN1 3′ ss 3 | BIN1 5′ ss 1 | 2, 3 | 0.50075 | 0.9005 | 0.7855 | 0.11525 | 0.237 | 0.077 | 417 |
| 312 | BIN1 3′ ss 3 | BIN1 5′ ss 1 | 2, 3, 4 | 0.604 | 0.867 | 0.83 | 0.1235 | 0.1865 | 0.18725 | 418 |
| 313 | BIN1 3′ ss 3 | BIN1 5′ ss 1 | 1 | 0.52875 | 0.797 | 0.7745 | 0.15225 | 0.267 | 0.17 | 419 |
| 314 | BIN1 3′ ss 3 | BIN1 5′ ss 1 | 1, 4 | 0.59225 | 0.779 | 0.78675 | 0.13675 | 0.21425 | 0.35675 | 420 |
| 315 | BIN1 3′ ss 3 | BIN1 5′ ss 1 | 1, 3 | 0.59775 | 0.804 | 0.8085 | 0.20825 | 0.33375 | 0.404 | 421 |
| 316 | BIN1 3′ ss 3 | BIN1 5′ ss 1 | 1, 3, 4 | 0.59375 | 0.816 | 0.75675 | 0.19375 | 0.28275 | 0.29475 | 422 |
| 317 | BIN1 3′ ss 3 | BIN1 5′ ss 1 | 1, 2 | 0.5455 | 0.8125 | 0.8055 | 0.10775 | 0.19425 | 0.1765 | 423 |
| 318 | BIN1 3′ ss 3 | BIN1 5′ ss 1 | 1, 2, 4 | 0.62975 | 0.91 | 0.843 | 0.16075 | 0.25425 | 0.726333333 | 424 |
| 319 | BIN1 3′ ss 3 | BIN1 5′ ss 1 | 1, 2, 3 | 0.5955 | 0.826 | 0.80975 | 0.1185 | 0.256 | 0.1655 | 425 |
| 320 | BIN1 3′ ss 3 | BIN1 5′ ss 1 | 1, 2, 3, 4 | 0.651 | 0.87375 | 0.75725 | 0.15075 | 0.3655 | 0.12075 | 426 |
| 321 | BIN1 3′ ss 3 | BIN1 5′ ss 2 | None | 0.23275 | 0.5555 | 0.633 | 0.027 | 0.092 | 0.0945 | 427 |
| 322 | BIN1 3′ ss 3 | BIN1 5′ ss 2 | 4 | 0.29975 | 0.64825 | 0.56375 | 0.03975 | 0.1175 | 0.08525 | 428 |
| 323 | BIN1 3′ ss 3 | BIN1 5′ ss 2 | 3 | 0.254 | 0.648 | 0.6115 | 0.03575 | 0.106 | 0.11725 | 429 |
| 324 | BIN1 3′ ss 3 | BIN1 5′ ss 2 | 3, 4 | 0.30625 | 0.6575 | 0.629 | 0.04775 | 0.1235 | 0.08825 | 430 |
| 325 | BIN1 3′ ss 3 | BIN1 5′ ss 2 | 2 | 0.1895 | 0.57025 | 0.63225 | 0.02275 | 0.0825 | 0.04275 | 431 |
| 326 | BIN1 3′ ss 3 | BIN1 5′ ss 2 | 2, 4 | 0.25 | 0.618 | 0.67775 | 0.02325 | 0.055 | 0.026 | 432 |
| 327 | BIN1 3′ ss 3 | BIN1 5′ ss 2 | 2, 3 | 0.19375 | 0.6935 | 0.64425 | 0.02025 | 0.09225 | 0.15475 | 433 |
| 328 | BIN1 3′ ss 3 | BIN1 5′ ss 2 | 2, 3, 4 | 0.31175 | 0.71875 | 0.68875 | 0.04375 | 0.048 | 0.05575 | 434 |
| 329 | BIN1 3′ ss 3 | BIN1 5′ ss 2 | 1 | 0.30475 | 0.726 | 0.723 | 0.03075 | 0.0715 | 0.12725 | 435 |
| 330 | BIN1 3′ ss 3 | BIN1 5′ ss 2 | 1, 4 | 0.30525 | 0.65075 | 0.636 | 0.056 | 0.13525 | 0.063 | 436 |
| 331 | BIN1 3′ ss 3 | BIN1 5′ ss 2 | 1, 3 | 0.37925 | 0.6845 | 0.76075 | 0.0555 | 0.09425 | 0.143 | 437 |
| 332 | BIN1 3′ ss 3 | BIN1 5′ ss 2 | 1, 3, 4 | 0.3515 | 0.71 | 0.6205 | 0.0495 | 0.1435 | 0.1095 | 438 |
| 333 | BIN1 3′ ss 3 | BIN1 5′ ss 2 | 1, 2 | 0.20775 | 0.61875 | 0.65175 | 0.03 | 0.13275 | 0.163 | 439 |
| 334 | BIN1 3′ ss 3 | BIN1 5′ ss 2 | 1, 2, 4 | 0.30025 | 0.721 | 0.607 | 0.0475 | 0.20775 | 0.08 | 440 |
| 335 | BIN1 3′ ss 3 | BIN1 5′ ss 2 | 1, 2, 3 | 0.25425 | 0.7285 | 0.685 | 0.0285 | 0.05025 | 0.1175 | 441 |
| 336 | BIN1 3′ ss 3 | BIN1 5′ ss 2 | 1, 2, 3, 4 | 0.333 | 0.7165 | 0.77075 | 0.03975 | 0.1235 | 0.09475 | 442 |
| 337 | BIN1 3′ ss 3 | BIN1 5′ ss 3 | None | 0.2415 | 0.5195 | 0.45375 | 0.03225 | 0.1425 | 0.0395 | 443 |
| 338 | BIN1 3′ ss 3 | BIN1 5′ ss 3 | 4 | 0.26875 | 0.5795 | 0.58125 | 0.03725 | 0.0435 | 0.0485 | 444 |
| 339 | BIN1 3′ ss 3 | BIN1 5′ ss 3 | 3 | 0.2935 | 0.64175 | 0.60125 | 0.026 | 0.1175 | 0.159 | 445 |
| 340 | BIN1 3′ ss 3 | BIN1 5′ ss 3 | 3, 4 | 0.33175 | 0.501 | 0.64475 | 0.0535 | 0.08325 | 0.1 | 446 |
| 341 | BIN1 3′ ss 3 | BIN1 5′ ss 3 | 2 | 0.27775 | 0.6295 | 0.6805 | 0.0255 | 0.0845 | 0.093 | 447 |
| 342 | BIN1 3′ ss 3 | BIN1 5′ ss 3 | 2, 4 | 0.286 | 0.61275 | 0.55025 | 0.035 | 0.174 | 0.14275 | 448 |
| 343 | BIN1 3′ ss 3 | BIN1 5′ ss 3 | 2, 3 | 0.24775 | 0.61325 | 0.5535 | 0.033 | 0.27925 | 0.01525 | 449 |
| 344 | BIN1 3′ ss 3 | BIN1 5′ ss 3 | 2, 3, 4 | 0.33025 | 0.638 | 0.665 | 0.057 | 0.09925 | 0.0255 | 450 |
| 345 | BIN1 3′ ss 3 | BIN1 5′ ss 3 | 1 | 0.30325 | 0.673 | 0.63925 | 0.041 | 0.10525 | 0.108 | 451 |
| 346 | BIN1 3′ ss 3 | BIN1 5′ ss 3 | 1, 4 | 0.344 | 0.66225 | 0.6455 | 0.049 | 0.14575 | 0.048 | 452 |
| 347 | BIN1 3′ ss 3 | BIN1 5′ ss 3 | 1, 3 | 0.3855 | 0.681 | 0.68825 | 0.0565 | 0.081 | 0.09825 | 453 |
| 348 | BIN1 3′ ss 3 | BIN1 5′ ss 3 | 1, 3, 4 | 0.3625 | 0.58425 | 0.62375 | 0.08425 | 0.0785 | 0.1025 | 454 |
| 349 | BIN1 3′ ss 3 | BIN1 5′ ss 3 | 1, 2 | 0.25875 | 0.6055 | 0.6635 | 0.02625 | 0.1155 | 0.0745 | 455 |
| 350 | BIN1 3′ ss 3 | BIN1 5′ ss 3 | 1, 2, 4 | 0.3655 | 0.731 | 0.7205 | 0.058 | 0.156 | 0.14475 | 456 |
| 351 | BIN1 3′ ss 3 | BIN1 5′ ss 3 | 1, 2, 3 | 0.30325 | 0.65825 | 0.65025 | 0.036 | 0.18425 | 0.15825 | 457 |
| 352 | BIN1 3′ ss 3 | BIN1 5′ ss 3 | 1, 2, 3, 4 | 0.366 | 0.6145 | 0.68 | ND | ND | ND | 458 |
| 353 | BIN1 3′ ss 3 | BIN1 5′ ss 4 | None | 0.2335 | 0.56875 | 0.5565 | 0.02075 | 0.0315 | 0.06375 | 459 |
| 354 | BIN1 3′ ss 3 | BIN1 5′ ss 4 | 4 | 0.25 | 0.531 | 0.515 | 0.03875 | 0.0625 | 0.022 | 460 |
| 355 | BIN1 3′ ss 3 | BIN1 5′ ss 4 | 3 | 0.17875 | 0.55625 | 0.4085 | 0.01975 | 0.0545 | 0.0865 | 461 |
| 356 | BIN1 3′ ss 3 | BIN1 5′ ss 4 | 3, 4 | 0.2845 | 0.56675 | 0.588 | 0.03775 | 0.03825 | 0.14 | 462 |
| 357 | BIN1 3′ ss 3 | BIN1 5′ ss 4 | 2 | 0.15875 | 0.499 | 0.54375 | 0.02225 | 0.07175 | 0.033 | 463 |
| 358 | BIN1 3′ ss 3 | BIN1 5′ ss 4 | 2, 4 | 0.1535 | 0.441 | 0.424 | 0.02825 | 0.05225 | 0.01625 | 464 |
| 359 | BIN1 3′ ss 3 | BIN1 5′ ss 4 | 2, 3 | 0.2575 | 0.64225 | 0.47325 | 0.013 | 0.082 | 0.12475 | 465 |
| 360 | BIN1 3′ ss 3 | BIN1 5′ ss 4 | 2, 3, 4 | 0.214 | 0.495 | 0.52425 | 0.01725 | 0.046 | 0.04025 | 466 |
| 361 | BIN1 3′ ss 3 | BIN1 5′ ss 4 | 1 | 0.23625 | 0.524 | 0.58675 | 0.021 | 0.05625 | 0.04225 | 467 |
| 362 | BIN1 3′ ss 3 | BIN1 5′ ss 4 | 1, 4 | 0.304 | 0.61675 | 0.551 | 0.04525 | 0.12625 | 0.10275 | 468 |
| 363 | BIN1 3′ ss 3 | BIN1 5′ ss 4 | 1, 3 | 0.269 | 0.597 | 0.495 | 0.0305 | 0.06375 | 0.106 | 469 |
| 364 | BIN1 3′ ss 3 | BIN1 5′ ss 4 | 1, 3, 4 | 0.29 | 0.55725 | 0.56925 | 0.043 | 0.039 | 0.11825 | 470 |
| 365 | BIN1 3′ ss 3 | BIN1 5′ ss 4 | 1, 2 | 0.1965 | 0.57 | 0.603 | 0.0155 | 0.01275 | 0.019 | 471 |
| 366 | BIN1 3′ ss 3 | BIN1 5′ ss 4 | 1, 2, 4 | 0.2615 | 0.616 | 0.5595 | ND | ND | ND | 472 |
| 367 | BIN1 3′ ss 3 | BIN1 5′ ss 4 | 1, 2, 3 | 0.1825 | 0.58475 | 0.57625 | 0.02275 | 0.08925 | 0.16075 | 473 |
| 368 | BIN1 3′ ss 3 | BIN1 5′ ss 4 | 1, 2, 3, 4 | 0.26525 | 0.5455 | 0.62525 | 0.01975 | 0.261 | 0.018 | 474 |
| 369 | BIN1 3′ ss 3 | BIN1 5′ ss 5 | None | 0.1985 | 0.4355 | 0.48025 | 0.025 | 0.0425 | 0.052 | 475 |
| 370 | BIN1 3′ ss 3 | BIN1 5′ ss 5 | 4 | 0.168 | 0.42 | 0.325 | 0.025 | 0.04175 | 0.01325 | 476 |
| 371 | BIN1 3′ ss 3 | BIN1 5′ ss 5 | 3 | 0.12925 | 0.436 | 0.41975 | 0.02125 | 0.04 | 0.0925 | 477 |
| 372 | BIN1 3′ ss 3 | BIN1 5′ ss 5 | 3, 4 | 0.237 | 0.49375 | 0.49 | 0.0205 | 0.049 | 0.0145 | 478 |
| 373 | BIN1 3′ ss 3 | BIN1 5′ ss 5 | 2 | 0.15825 | 0.41025 | 0.47575 | 0.0145 | 0.02025 | 0.01325 | 479 |
| 374 | BIN1 3′ ss 3 | BIN1 5′ ss 5 | 2, 4 | 0.14775 | 0.36575 | 0.47625 | 0.0225 | 0.12125 | 0.0215 | 480 |
| 375 | BIN1 3′ ss 3 | BIN1 5′ ss 5 | 2, 3 | 0.17075 | 0.47775 | 0.7005 | 0.01175 | 0.02475 | 0.05375 | 481 |
| 376 | BIN1 3′ ss 3 | BIN1 5′ ss 5 | 2, 3, 4 | 0.13975 | 0.39 | 0.43225 | 0.021 | 0.0285 | 0.1405 | 482 |
| 377 | BIN1 3′ ss 3 | BIN1 5′ ss 5 | 1 | 0.21625 | 0.53 | 0.498 | 0.017 | 0.10325 | 0.03175 | 483 |
| 378 | BIN1 3′ ss 3 | BIN1 5′ ss 5 | 1, 4 | 0.2 | 0.46575 | 0.44075 | 0.018 | 0.04725 | 0.0725 | 484 |
| 379 | BIN1 3′ ss 3 | BIN1 5′ ss 5 | 1, 3 | 0.19475 | 0.481 | 0.6345 | 0.01475 | 0.01325 | 0.014 | 485 |
| 380 | BIN1 3′ ss 3 | BIN1 5′ ss 5 | 1, 3, 4 | 0.20575 | 0.30275 | 0.486 | 0.02275 | 0.077 | 0.0205 | 486 |
| 381 | BIN1 3′ ss 3 | BIN1 5′ ss 5 | 1, 2 | 0.11975 | 0.44325 | 0.44775 | 0.0105 | 0.022 | 0.01975 | 487 |
| 382 | BIN1 3′ ss 3 | BIN1 5′ ss 5 | 1, 2, 4 | 0.14975 | 0.44525 | 0.35375 | 0.02425 | 0.0235 | 0.0955 | 488 |
| 383 | BIN1 3′ ss 3 | BIN1 5′ ss 5 | 1, 2, 3 | 0.1035 | 0.41225 | 0.33075 | 0.018 | 0.11525 | 0.0255 | 489 |
| 384 | BIN1 3′ ss 3 | BIN1 5′ ss 5 | 1, 2, 3, 4 | 0.17825 | 0.46625 | 0.52225 | 0.012 | 0.02825 | 0.01275 | 490 |
| 385 | BIN1 3′ ss 4 | Compensated | None | 0.2995 | 0.602 | 0.75 | 0.02675 | 0.0465 | 0.03075 | 491 |
| 386 | BIN1 3′ ss 4 | Compensated | 4 | 0.334 | 0.55725 | 0.64825 | 0.03325 | 0.05225 | 0.0505 | 492 |
| 387 | BIN1 3′ ss 4 | Compensated | 3 | 0.31525 | 0.674 | 0.6655 | 0.0425 | 0.10775 | 0.103 | 493 |
| 388 | BIN1 3′ ss 4 | Compensated | 3, 4 | 0.33225 | 0.56475 | 0.51175 | 0.0485 | 0.09025 | 0.05225 | 494 |
| 389 | BIN1 3′ ss 4 | Compensated | 2 | 0.23675 | 0.55425 | 0.4795 | 0.02875 | 0.13425 | 0.089 | 495 |
| 390 | BIN1 3′ ss 4 | Compensated | 2, 4 | 0.34675 | 0.64875 | 0.73775 | 0.02775 | 0.00975 | 0.0125 | 496 |
| 391 | BIN1 3′ ss 4 | Compensated | 2, 3 | 0.27125 | 0.60525 | 0.63 | 0.041 | 0.0905 | 0.06575 | 497 |
| 392 | BIN1 3′ ss 4 | Compensated | 2, 3, 4 | 0.339 | 0.6005 | 0.62275 | 0.0385 | 0.10425 | 0.136 | 498 |
| 393 | BIN1 3′ ss 4 | Compensated | 1 | 0.341 | 0.67875 | 0.67175 | 0.046 | 0.1055 | 0.1085 | 499 |
| 394 | BIN1 3′ ss 4 | Compensated | 1, 4 | 0.3515 | 0.617 | 0.5075 | 0.055 | 0.09375 | 0.057 | 500 |
| 395 | BIN1 3′ ss 4 | Compensated | 1, 3 | 0.387 | 0.74425 | 0.77975 | 0.052 | 0.0675 | 0.037 | 501 |
| 396 | BIN1 3′ ss 4 | Compensated | 1, 3, 4 | 0.37725 | 0.66175 | 0.59025 | 0.06325 | 0.0755 | 0.0365 | 502 |
| 397 | BIN1 3′ ss 4 | Compensated | 1, 2 | 0.31675 | 0.65125 | 0.7605 | ND | ND | ND | 503 |
| 398 | BIN1 3′ ss 4 | Compensated | 1, 2, 4 | 0.36525 | 0.63425 | 0.84325 | ND | ND | ND | 504 |
| 399 | BIN1 3′ ss 4 | Compensated | 1, 2, 3 | ND | ND | ND | 0.03925 | 0.1145 | 0.15475 | 505 |
| 400 | BIN1 3′ ss 4 | Compensated | 1, 2, 3, 4 | 0.41 | 0.649 | 0.55425 | 0.04675 | 0.11425 | 0.06275 | 506 |
| 401 | BIN1 3′ ss 4 | BIN1 5′ ss 1 | None | 0.385 | 0.67325 | 0.623 | 0.08875 | 0.1505 | 0.207 | 507 |
| 402 | BIN1 3′ ss 4 | BIN1 5′ ss 1 | 4 | 0.527 | 0.84075 | 0.8905 | 0.06975 | 0.19 | 0.04075 | 508 |
| 403 | BIN1 3′ ss 4 | BIN1 5′ ss 1 | 3 | 0.561 | 0.83 | 0.707 | 0.1165 | 0.27325 | 0.354 | 509 |
| 404 | BIN1 3′ ss 4 | BIN1 5′ ss 1 | 3, 4 | 0.6205 | 0.80525 | 0.812 | 0.181 | 0.2015 | 0.31225 | 510 |
| 405 | BIN1 3′ ss 4 | BIN1 5′ ss 1 | 2 | 0.44625 | 0.76675 | 0.83875 | 0.10175 | 0.232 | 0.13875 | 511 |
| 406 | BIN1 3′ ss 4 | BIN1 5′ ss 1 | 2, 4 | 0.528 | 0.77575 | 0.7865 | 0.1055 | 0.36525 | 0.61825 | 512 |
| 407 | BIN1 3′ ss 4 | BIN1 5′ ss 1 | 2, 3 | 0.49575 | 0.82675 | 0.721 | 0.08575 | 0.17175 | 0.29325 | 513 |
| 408 | BIN1 3′ ss 4 | BIN1 5′ ss 1 | 2, 3, 4 | 0.6105 | 0.81725 | 0.79825 | 0.1645 | 0.30125 | 0.25175 | 514 |
| 409 | BIN1 3′ ss 4 | BIN1 5′ ss 1 | 1 | 0.60325 | 0.81325 | 0.82 | 0.111 | 0.17175 | 0.3355 | 515 |
| 410 | BIN1 3′ ss 4 | BIN1 5′ ss 1 | 1, 4 | 0.54525 | 0.73175 | 0.78425 | 0.13675 | 0.12975 | 0.143 | 516 |
| 411 | BIN1 3′ ss 4 | BIN1 5′ ss 1 | 1, 3 | 0.6535 | 0.8345 | 0.87375 | 0.14975 | 0.26625 | 0.594 | 517 |
| 412 | BIN1 3′ ss 4 | BIN1 5′ ss 1 | 1, 3, 4 | 0.65825 | 0.804 | 0.7675 | 0.145 | 0.22425 | 0.31175 | 518 |
| 413 | BIN1 3′ ss 4 | BIN1 5′ ss 1 | 1, 2 | 0.5815 | 0.888 | 0.85525 | 0.12 | 0.15 | 0.1715 | 519 |
| 414 | BIN1 3′ ss 4 | BIN1 5′ ss 1 | 1, 2, 4 | 0.5465 | 0.73225 | 0.8115 | 0.184 | 0.247 | 0.43375 | 520 |
| 415 | BIN1 3′ ss 4 | BIN1 5′ ss 1 | 1, 2, 3 | 0.63875 | 0.82275 | 0.852 | 0.10925 | 0.238 | 0.37575 | 521 |
| 416 | BIN1 3′ ss 4 | BIN1 5′ ss 1 | 1, 2, 3, 4 | 0.67825 | 0.897 | 0.87675 | 0.135 | 0.244 | 0.019 | 522 |
| 417 | BIN1 3′ ss 4 | BIN1 5′ ss 2 | None | 0.208 | 0.6065 | 0.62525 | 0.037 | 0.07925 | 0.17525 | 523 |
| 418 | BIN1 3′ ss 4 | BIN1 5′ ss 2 | 4 | 0.25675 | 0.54025 | 0.6125 | 0.02825 | 0.06875 | 0.0855 | 524 |
| 419 | BIN1 3′ ss 4 | BIN1 5′ ss 2 | 3 | 0.228 | 0.56475 | 0.5875 | 0.0315 | 0.0875 | 0.06325 | 525 |
| 420 | BIN1 3′ ss 4 | BIN1 5′ ss 2 | 3, 4 | 0.31275 | 0.632 | 0.7275 | 0.04975 | 0.1005 | 0.19025 | 526 |
| 421 | BIN1 3′ ss 4 | BIN1 5′ ss 2 | 2 | 0.1845 | 0.534 | 0.57575 | 0.0225 | 0.07475 | 0.06125 | 527 |
| 422 | BIN1 3′ ss 4 | BIN1 5′ ss 2 | 2, 4 | 0.23 | 0.58475 | 0.655 | 0.02775 | 0.20075 | 0.093 | 528 |
| 423 | BIN1 3′ ss 4 | BIN1 5′ ss 2 | 2, 3 | 0.1515 | 0.558 | 0.6385 | 0.01375 | 0.0885 | 0.0395 | 529 |
| 424 | BIN1 3′ ss 4 | BIN1 5′ ss 2 | 2, 3, 4 | 0.2645 | 0.658 | 0.6285 | 0.03825 | 0.1585 | 0.0485 | 530 |
| 425 | BIN1 3′ ss 4 | BIN1 5′ ss 2 | 1 | 0.253 | 0.6305 | 0.5935 | 0.0565 | 0.093 | 0.06475 | 531 |
| 426 | BIN1 3′ ss 4 | BIN1 5′ ss 2 | 1, 4 | 0.329 | 0.6635 | 0.6905 | 0.0405 | 0.10375 | 0.13025 | 532 |
| 427 | BIN1 3′ ss 4 | BIN1 5′ ss 2 | 1, 3 | 0.3155 | 0.60225 | 0.64575 | 0.04725 | 0.0765 | 0.12625 | 533 |
| 428 | BIN1 3′ ss 4 | BIN1 5′ ss 2 | 1, 3, 4 | 0.297 | 0.6175 | 0.55225 | 0.04275 | 0.079 | 0.1195 | 534 |
| 429 | BIN1 3′ ss 4 | BIN1 5′ ss 2 | 1, 2 | 0.2185 | 0.579 | 0.6555 | 0.0235 | 0.081 | 0.111 | 535 |
| 430 | BIN1 3′ ss 4 | BIN1 5′ ss 2 | 1, 2, 4 | 0.21325 | 0.5495 | 0.43375 | 0.0375 | 0.05475 | 0.04325 | 536 |
| 431 | BIN1 3′ ss 4 | BIN1 5′ ss 2 | 1, 2, 3 | 0.27175 | 0.74775 | 0.702 | 0.0295 | 0.05575 | 0.0565 | 537 |
| 432 | BIN1 3′ ss 4 | BIN1 5′ ss 2 | 1, 2, 3, 4 | 0.36075 | 0.7215 | 0.77375 | ND | ND | ND | 538 |
| 433 | BIN1 3′ ss 4 | BIN1 5′ ss 3 | None | 0.25925 | 0.54575 | 0.73275 | ND | ND | ND | 539 |
| 434 | BIN1 3′ ss 4 | BIN1 5′ ss 3 | 4 | 0.25475 | 0.42375 | 0.449 | 0.0505 | 0.11325 | 0.0955 | 540 |
| 435 | BIN1 3′ ss 4 | BIN1 5′ ss 3 | 3 | 0.24675 | 0.6015 | 0.669 | 0.01475 | 0.013 | 0.01525 | 541 |
| 436 | BIN1 3′ ss 4 | BIN1 5′ ss 3 | 3, 4 | 0.3265 | 0.59175 | 0.559 | 0.04775 | 0.1115 | 0.039 | 542 |
| 437 | BIN1 3′ ss 4 | BIN1 5′ ss 3 | 2 | 0.1995 | 0.56675 | 0.6315 | 0.03825 | 0.09775 | 0.134 | 543 |
| 438 | BIN1 3′ ss 4 | BIN1 5′ ss 3 | 2, 4 | 0.2975 | 0.528 | 0.59575 | 0.0245 | 0.141 | 0.08325 | 544 |
| 439 | BIN1 3′ ss 4 | BIN1 5′ ss 3 | 2, 3 | 0.24 | 0.67875 | 0.636 | 0.02 | 0.03 | 0.10425 | 545 |
| 440 | BIN1 3′ ss 4 | BIN1 5′ ss 3 | 2, 3, 4 | 0.346 | 0.58575 | 0.63875 | 0.0315 | 0.12225 | 0.12075 | 546 |
| 441 | BIN1 3′ ss 4 | BIN1 5′ ss 3 | 1 | 0.28325 | 0.5835 | 0.6165 | 0.08325 | 0.1355 | 0.08375 | 547 |
| 442 | BIN1 3′ ss 4 | BIN1 5′ ss 3 | 1, 4 | 0.27025 | 0.53825 | 0.59675 | 0.047 | 0.03775 | 0.06375 | 548 |
| 443 | BIN1 3′ ss 4 | BIN1 5′ ss 3 | 1, 3 | 0.35275 | 0.61425 | 0.65775 | 0.03925 | 0.04475 | 0.091 | 549 |
| 444 | BIN1 3′ ss 4 | BIN1 5′ ss 3 | 1, 3, 4 | 0.36725 | 0.57875 | 0.61925 | 0.05375 | 0.0945 | 0.10475 | 550 |
| 445 | BIN1 3′ ss 4 | BIN1 5′ ss 3 | 1, 2 | 0.28975 | 0.6955 | 0.5445 | 0.02625 | 0.073 | 0.0625 | 551 |
| 446 | BIN1 3′ ss 4 | BIN1 5′ ss 3 | 1, 2, 4 | 0.307 | 0.64175 | 0.51125 | 0.04525 | 0.07575 | 0.039 | 552 |
| 447 | BIN1 3′ ss 4 | BIN1 5′ ss 3 | 1, 2, 3 | 0.3065 | 0.67475 | 0.713 | 0.02375 | 0.0655 | 0.0185 | 553 |
| 448 | BIN1 3′ ss 4 | BIN1 5′ ss 3 | 1, 2, 3, 4 | 0.39725 | 0.68875 | 0.6825 | 0.05525 | 0.13725 | 0.05 | 554 |
| 449 | BIN1 3′ ss 4 | BIN1 5′ ss 4 | None | 0.21075 | 0.57975 | 0.49225 | 0.0195 | 0.033 | 0.034 | 555 |
| 450 | BIN1 3′ ss 4 | BIN1 5′ ss 4 | 4 | 0.269 | 0.54625 | 0.50375 | 0.02025 | 0.03325 | 0.05525 | 556 |
| 451 | BIN1 3′ ss 4 | BIN1 5′ ss 4 | 3 | 0.15325 | 0.4695 | 0.56325 | 0.019 | 0.0395 | 0.02275 | 557 |
| 452 | BIN1 3′ ss 4 | BIN1 5′ ss 4 | 3, 4 | 0.26975 | 0.53925 | 0.569 | 0.0305 | 0.0285 | 0.10225 | 558 |
| 453 | BIN1 3′ ss 4 | BIN1 5′ ss 4 | 2 | 0.17175 | 0.434 | 0.52125 | 0.02 | 0.04675 | 0.06475 | 559 |
| 454 | BIN1 3′ ss 4 | BIN1 5′ ss 4 | 2, 4 | 0.17825 | 0.40275 | 0.481 | 0.01475 | 0.086 | 0.02125 | 560 |
| 455 | BIN1 3′ ss 4 | BIN1 5′ ss 4 | 2, 3 | 0.12625 | 0.44375 | 0.449 | 0.01125 | 0.0295 | 0.01225 | 561 |
| 456 | BIN1 3′ ss 4 | BIN1 5′ ss 4 | 2, 3, 4 | 0.21125 | 0.49275 | 0.51775 | 0.0205 | 0.06475 | 0.02725 | 562 |
| 457 | BIN1 3′ ss 4 | BIN1 5′ ss 4 | 1 | 0.20325 | 0.5025 | 0.474 | 0.03175 | 0.00925 | 0.0235 | 563 |
| 458 | BIN1 3′ ss 4 | BIN1 5′ ss 4 | 1, 4 | 0.29775 | 0.56375 | 0.531 | 0.0175 | 0.02275 | 0.0345 | 564 |
| 459 | BIN1 3′ ss 4 | BIN1 5′ ss 4 | 1, 3 | 0.17825 | 0.45625 | 0.40725 | 0.027 | 0.085 | 0.04525 | 565 |
| 460 | BIN1 3′ ss 4 | BIN1 5′ ss 4 | 1, 3, 4 | 0.24575 | 0.4815 | 0.48725 | 0.03525 | 0.03975 | 0.03775 | 566 |
| 461 | BIN1 3′ ss 4 | BIN1 5′ ss 4 | 1, 2 | 0.2015 | 0.55925 | 0.51675 | 0.02075 | 0.049 | 0.02775 | 567 |
| 462 | BIN1 3′ ss 4 | BIN1 5′ ss 4 | 1, 2, 4 | 0.22825 | 0.4895 | 0.555 | 0.0225 | 0.14075 | 0.08075 | 568 |
| 463 | BIN1 3′ ss 4 | BIN1 5′ ss 4 | 1, 2, 3 | 0.20375 | 0.54275 | 0.62225 | 0.02275 | 0.06075 | 0.09375 | 569 |
| 464 | BIN1 3′ ss 4 | BIN1 5′ ss 4 | 1, 2, 3, 4 | 0.242 | 0.543 | 0.63975 | 0.04925 | 0.086 | 0.03225 | 570 |
| 465 | BIN1 3′ ss 4 | BIN1 5′ ss 5 | None | 0.17325 | 0.4235 | 0.354 | 0.02325 | 0.02 | 0.10425 | 571 |
| 466 | BIN1 3′ ss 4 | BIN1 5′ ss 5 | 4 | 0.1995 | 0.38225 | 0.41275 | 0.02 | 0.06175 | 0.0945 | 572 |
| 467 | BIN1 3′ ss 4 | BIN1 5′ ss 5 | 3 | 0.1685 | 0.3965 | 0.415 | 0.01775 | 0.03625 | 0.042 | 573 |
| 468 | BIN1 3′ ss 4 | BIN1 5′ ss 5 | 3, 4 | 0.21875 | 0.427 | 0.4885 | 0.022 | 0.02025 | 0.05625 | 574 |
| 469 | BIN1 3′ ss 4 | BIN1 5′ ss 5 | 2 | 0.14475 | 0.4135 | 0.3605 | 0.017 | 0.0405 | 0.075 | 575 |
| 470 | BIN1 3′ ss 4 | BIN1 5′ ss 5 | 2, 4 | 0.1875 | 0.58575 | 0.49375 | 0.01375 | 0.066 | 0.00625 | 576 |
| 471 | BIN1 3′ ss 4 | BIN1 5′ ss 5 | 2, 3 | 0.04775 | 0.21725 | 0.16325 | 0.00925 | 0.021 | 0.01425 | 577 |
| 472 | BIN1 3′ ss 4 | BIN1 5′ ss 5 | 2, 3, 4 | 0.11875 | 0.3245 | 0.32225 | 0.01575 | 0.02225 | 0.0735 | 578 |
| 473 | BIN1 3′ ss 4 | BIN1 5′ ss 5 | 1 | 0.15775 | 0.37675 | 0.43575 | 0.01425 | 0.02175 | 0.03825 | 579 |
| 474 | BIN1 3′ ss 4 | BIN1 5′ ss 5 | 1, 4 | 0.202 | 0.501 | 0.41075 | 0.01825 | 0.0095 | 0.02475 | 580 |
| 475 | BIN1 3′ ss 4 | BIN1 5′ ss 5 | 1, 3 | 0.18825 | 0.4165 | 0.46575 | 0.01475 | 0.01225 | 0.03175 | 581 |
| 476 | BIN1 3′ ss 4 | BIN1 5′ ss 5 | 1, 3, 4 | 0.267 | 0.45225 | 0.523 | 0.02525 | 0.01125 | 0.09275 | 582 |
| 477 | BIN1 3′ ss 4 | BIN1 5′ ss 5 | 1, 2 | 0.12325 | 0.3665 | 0.2145 | 0.01175 | 0.05075 | 0.023 | 583 |
| 478 | BIN1 3′ ss 4 | BIN1 5′ ss 5 | 1, 2, 4 | 0.133 | 0.42975 | 0.3285 | 0.01925 | 0.01825 | 0.0515 | 584 |
| 479 | BIN1 3′ ss 4 | BIN1 5′ ss 5 | 1, 2, 3 | 0.11075 | 0.40875 | 0.40475 | 0.01675 | 0.091 | 0.02375 | 585 |
| 480 | BIN1 3′ ss 4 | BIN1 5′ ss 5 | 1, 2, 3, 4 | 0.1515 | 0.3675 | 0.352 | 0.01725 | 0.003 | 0.00275 | 586 |
| 481 | BIN1 3′ ss 5 | Compensated | None | 0.17925 | 0.399 | 0.446 | 0.0185 | 0.02725 | 0.047 | 587 |
| 482 | BIN1 3′ ss 5 | Compensated | 4 | 0.20425 | 0.50875 | 0.44275 | 0.024 | 0.039 | 0.08875 | 588 |
| 483 | BIN1 3′ ss 5 | Compensated | 3 | 0.16475 | 0.463 | 0.417 | 0.02925 | 0.0475 | 0.0595 | 589 |
| 484 | BIN1 3′ ss 5 | Compensated | 3, 4 | 0.17175 | 0.355 | 0.48525 | 0.0245 | 0.008 | 0.046 | 590 |
| 485 | BIN1 3′ ss 5 | Compensated | 2 | 0.14725 | 0.42475 | 0.341 | 0.01475 | 0.0325 | 0.0255 | 59 |
| 486 | BIN1 3′ ss 5 | Compensated | 2, 4 | 0.13725 | 0.33325 | 0.35375 | 0.016 | 0.0285 | 0.01525 | 592 |
| 487 | BIN1 3′ ss 5 | Compensated | 2, 3 | 0.107 | 0.3575 | 0.4065 | 0.01275 | 0.0345 | 0.02 | 593 |
| 488 | BIN1 3′ ss 5 | Compensated | 2, 3, 4 | 0.13475 | 0.34925 | 0.399 | 0.01175 | 0.05575 | 0.05825 | 594 |
| 489 | BIN1 3′ ss 5 | Compensated | 1 | 0.18375 | 0.43475 | 0.51475 | 0.019 | 0.04025 | 0.02125 | 595 |
| 490 | BIN1 3′ ss 5 | Compensated | 1, 4 | 0.156 | 0.40225 | 0.4335 | 0.0205 | 0.0295 | 0.043 | 596 |
| 491 | BIN1 3′ ss 5 | Compensated | 1, 3 | 0.17325 | 0.39075 | 0.4365 | 0.014 | 0.0145 | 0.02475 | 597 |
| 492 | BIN1 3′ ss 5 | Compensated | 1, 3, 4 | 0.16725 | 0.36875 | 0.4505 | 0.0135 | 0.02175 | 0.0965 | 598 |
| 493 | BIN1 3′ ss 5 | Compensated | 1, 2 | 0.14325 | 0.39375 | 0.46075 | 0.0165 | 0.067 | 0.02025 | 599 |
| 494 | BIN1 3′ ss 5 | Compensated | 1, 2, 4 | 0.14625 | 0.438 | 0.41625 | 0.01975 | 0.05925 | 0.0555 | 600 |
| 495 | BIN1 3′ ss 5 | Compensated | 1, 2, 3 | 0.13625 | 0.484 | 0.38575 | 0.01475 | 0.16075 | 0.0315 | 601 |
| 496 | BIN1 3′ ss 5 | Compensated | 1, 2, 3, 4 | 0.108 | 0.25925 | 0.28375 | 0.01675 | 0.076 | 0.031 | 602 |
| 497 | BIN1 3′ ss 5 | BIN1 5′ ss 1 | None | 0.25625 | 0.61325 | 0.6505 | 0.027 | 0.0985 | 0.03375 | 603 |
| 498 | BIN1 3′ ss 5 | BIN1 5′ ss 1 | 4 | 0.288 | 0.6305 | 0.6815 | 0.0455 | 0.06675 | 0.178 | 604 |
| 499 | BIN1 3′ ss 5 | BIN1 5′ ss 1 | 3 | 0.2935 | 0.72425 | 0.7125 | 0.054 | 0.16275 | 0.161 | 605 |
| 500 | BIN1 3′ ss 5 | BIN1 5′ ss 1 | 3, 4 | 0.35575 | 0.67775 | 0.68225 | 0.064 | 0.20125 | 0.107 | 606 |
| 501 | BIN1 3′ ss 5 | BIN1 5′ ss 1 | 2 | 0.226 | 0.60175 | 0.643 | 0.03425 | 0.1315 | 0.20925 | 607 |
| 502 | BIN1 3′ ss 5 | BIN1 5′ ss 1 | 2, 4 | 0.23875 | 0.65875 | 0.71575 | 0.04575 | 0.20625 | 0.2745 | 608 |
| 503 | BIN1 3′ ss 5 | BIN1 5′ ss 1 | 2, 3 | 0.2085 | 0.579 | 0.8805 | 0.0335 | 0.12975 | 0.07925 | 609 |
| 504 | BIN1 3′ ss 5 | BIN1 5′ ss 1 | 2, 3, 4 | 0.2775 | 0.62625 | 0.67475 | 0.0515 | 0.19725 | 0.14675 | 610 |
| 505 | BIN1 3′ ss 5 | BIN1 5′ ss 1 | 1 | 0.27925 | 0.69075 | 0.65 | 0.05575 | 0.069 | 0.0415 | 611 |
| 506 | BIN1 3′ ss 5 | BIN1 5′ ss 1 | 1, 4 | 0.34525 | 0.62 | 0.63525 | 0.0625 | 0.17425 | 0.07825 | 612 |
| 507 | BIN1 3′ ss 5 | BIN1 5′ ss 1 | 1, 3 | 0.382 | 0.697 | 0.74125 | 0.067 | 0.11975 | 0.167 | 613 |
| 508 | BIN1 3′ ss 5 | BIN1 5′ ss 1 | 1, 3, 4 | 0.38075 | 0.7095 | 0.523 | 0.07325 | 0.165 | 0.24475 | 614 |
| 509 | BIN1 3′ ss 5 | BIN1 5′ ss 1 | 1, 2 | 0.238 | 0.6235 | 0.538 | 0.03525 | 0.08925 | 0.1295 | 615 |
| 510 | BIN1 3′ ss 5 | BIN1 5′ ss 1 | 1, 2, 4 | 0.2495 | 0.6275 | 0.69475 | 0.05775 | 0.08925 | 0.08825 | 616 |
| 511 | BIN1 3′ ss 5 | BIN1 5′ ss 1 | 1, 2, 3 | 0.27 | 0.74825 | 0.71 | 0.0325 | 0.04625 | 0.00625 | 617 |
| 512 | BIN1 3′ ss 5 | BIN1 5′ ss 1 | 1, 2, 3, 4 | 0.40275 | 0.75425 | 0.77775 | 0.08375 | 0.2175 | 0.3375 | 618 |
| 513 | BIN1 3′ ss 5 | BIN1 5′ ss 2 | None | 0.143 | 0.4005 | 0.44525 | 0.01725 | 0.04625 | 0.03275 | 619 |
| 514 | BIN1 3′ ss 5 | BIN1 5′ ss 2 | 4 | 0.19075 | 0.48575 | 0.44875 | 0.0195 | 0.02475 | 0.03875 | 620 |
| 515 | BIN1 3′ ss 5 | BIN1 5′ ss 2 | 3 | 0.1345 | 0.4055 | 0.3615 | 0.016 | 0.0275 | 0.05525 | 621 |
| 516 | BIN1 3′ ss 5 | BIN1 5′ ss 2 | 3, 4 | 0.1465 | 0.39225 | 0.43075 | 0.017 | 0.04925 | 0.043 | 622 |
| 517 | BIN1 3′ ss 5 | BIN1 5′ ss 2 | 2 | 0.117 | 0.408 | 0.348 | 0.01175 | 0.04475 | 0.0335 | 623 |
| 518 | BIN1 3′ ss 5 | BIN1 5′ ss 2 | 2, 4 | 0.13525 | 0.38625 | 0.29575 | 0.01475 | 0.04625 | 0.101 | 624 |
| 519 | BIN1 3′ ss 5 | BIN1 5′ ss 2 | 2, 3 | 0.091 | 0.31075 | 0.375 | 0.0105 | 0.01375 | 0.03525 | 625 |
| 520 | BIN1 3′ ss 5 | BIN1 5′ ss 2 | 2, 3, 4 | 0.1335 | 0.447 | 0.40475 | 0.01275 | 0.03625 | 0.03875 | 626 |
| 521 | BIN1 3′ ss 5 | BIN1 5′ ss 2 | 1 | 0.13075 | 0.3625 | 0.398 | 0.0225 | 0.05725 | 0.0415 | 627 |
| 522 | BIN1 3′ ss 5 | BIN1 5′ ss 2 | 1, 4 | 0.1555 | 0.406 | 0.476 | 0.01375 | 0.029 | 0.01375 | 628 |
| 523 | BIN1 3′ ss 5 | BIN1 5′ ss 2 | 1, 3 | 0.13975 | 0.40875 | 0.478 | 0.02175 | 0.12525 | 0.057 | 629 |
| 524 | BIN1 3′ ss 5 | BIN1 5′ ss 2 | 1, 3, 4 | 0.14025 | 0.447 | 0.43475 | 0.0165 | 0.03525 | 0.02825 | 630 |
| 525 | BIN1 3′ ss 5 | BIN1 5′ ss 2 | 1, 2 | 0.11375 | 0.38225 | 0.42125 | 0.0105 | 0.013 | 0.02925 | 631 |
| 526 | BIN1 3′ ss 5 | BIN1 5′ ss 2 | 1, 2, 4 | 0.0715 | 0.21625 | 0.40075 | 0.01525 | 0.03625 | 0.12125 | 632 |
| 527 | BIN1 3′ ss 5 | BIN1 5′ ss 2 | 1, 2, 3 | 0.09525 | 0.37275 | 0.5185 | 0.01475 | 0.037 | 0.01575 | 633 |
| 528 | BIN1 3′ ss 5 | BIN1 5′ ss 2 | 1, 2, 3, 4 | 0.1345 | 0.37175 | 0.5055 | 0.02225 | 0.07625 | 0.0255 | 634 |
| 529 | BIN1 3′ ss 5 | BIN1 5′ ss 3 | None | 0.1485 | 0.34425 | 0.41775 | 0.019 | 0.03075 | 0.072 | 635 |
| 530 | BIN1 3′ ss 5 | BIN1 5′ ss 3 | 4 | 0.15625 | 0.3665 | 0.4135 | 0.01975 | 0.0405 | 0.019 | 636 |
| 531 | BIN1 3′ ss 5 | BIN1 5′ ss 3 | 3 | 0.14275 | 0.3825 | 0.3975 | 0.017 | 0.0855 | 0.02625 | 637 |
| 532 | BIN1 3′ ss 5 | BIN1 5′ ss 3 | 3, 4 | 0.15475 | 0.34475 | 0.3715 | 0.0185 | 0.025 | 0.08375 | 638 |
| 533 | BIN1 3′ ss 5 | BIN1 5′ ss 3 | 2 | 0.124 | 0.3155 | 0.30775 | 0.01325 | 0.04325 | 0.01475 | 639 |
| 534 | BIN1 3′ ss 5 | BIN1 5′ ss 3 | 2, 4 | 0.13575 | 0.30275 | 0.38675 | 0.0135 | 0.051 | 0.00575 | 640 |
| 535 | BIN1 3′ ss 5 | BIN1 5′ ss 3 | 2, 3 | 0.097 | 0.32325 | 0.354 | 0.01225 | 0.0185 | 0.016 | 641 |
| 536 | BIN1 3′ ss 5 | BIN1 5′ ss 3 | 2, 3, 4 | 0.1075 | 0.308 | 0.33 | 0.01725 | 0.0415 | 0.0645 | 642 |
| 537 | BIN1 3′ ss 5 | BIN1 5′ ss 3 | 1 | 0.172 | 0.4205 | 0.4665 | 0.01475 | 0.03775 | 0.024 | 643 |
| 538 | BIN1 3′ ss 5 | BIN1 5′ ss 3 | 1, 4 | 0.16725 | 0.40375 | 0.45225 | 0.0225 | 0.0325 | 0.049 | 644 |
| 539 | BIN1 3′ ss 5 | BIN1 5′ ss 3 | 1, 3 | 0.14175 | 0.3845 | 0.45375 | 0.015 | 0.01475 | 0.01025 | 645 |
| 540 | BIN1 3′ ss 5 | BIN1 5′ ss 3 | 1, 3, 4 | 0.1435 | 0.28475 | 0.35975 | 0.01425 | 0.022 | 0.0135 | 646 |
| 541 | BIN1 3′ ss 5 | BIN1 5′ ss 3 | 1, 2 | 0.1415 | 0.39625 | 0.466 | 0.0115 | 0.0765 | 0.01525 | 647 |
| 542 | BIN1 3′ ss 5 | BIN1 5′ ss 3 | 1, 2, 4 | 0.16325 | 0.398 | 0.498 | 0.01925 | 0.06 | 0.0475 | 648 |
| 543 | BIN1 3′ ss 5 | BIN1 5′ ss 3 | 1, 2, 3 | 0.1185 | 0.403 | 0.412 | 0.01425 | 0.03575 | 0.036 | 649 |
| 544 | BIN1 3′ ss 5 | BIN1 5′ ss 3 | 1, 2, 3, 4 | 0.12925 | 0.2865 | 0.31175 | 0.01875 | 0.02025 | 0.194 | 650 |
| 545 | BIN1 3′ ss 5 | BIN1 5′ ss 4 | None | 0.14925 | 0.35325 | 0.39075 | 0.0155 | 0.0185 | 0.04825 | 651 |
| 546 | BIN1 3′ ss 5 | BIN1 5′ ss 4 | 4 | 0.16375 | 0.3555 | 0.39775 | 0.0135 | 0.037 | 0.01425 | 652 |
| 547 | BIN1 3′ ss 5 | BIN1 5′ ss 4 | 3 | 0.10525 | 0.29225 | 0.29425 | 0.01725 | 0.0115 | 0.07925 | 653 |
| 548 | BIN1 3′ ss 5 | BIN1 5′ ss 4 | 3, 4 | 0.138 | 0.36725 | 0.346 | 0.0135 | 0.064 | 0.03525 | 654 |
| 549 | BIN1 3′ ss 5 | BIN1 5′ ss 4 | 2 | 0.1205 | 0.24725 | 0.33075 | 0.0165 | 0.03975 | 0.02325 | 655 |
| 550 | BIN1 3′ ss 5 | BIN1 5′ ss 4 | 2, 4 | 0.155 | 0.318 | 0.34475 | 0.01675 | 0.074 | 0.01475 | 656 |
| 551 | BIN1 3′ ss 5 | BIN1 5′ ss 4 | 2, 3 | 0.10425 | 0.30775 | 0.2425 | 0.01225 | 0.03525 | 0.07475 | 657 |
| 552 | BIN1 3′ ss 5 | BIN1 5′ ss 4 | 2, 3, 4 | 0.09925 | 0.277 | 0.33425 | 0.01325 | 0.03575 | 0.0185 | 658 |
| 553 | BIN1 3′ ss 5 | BIN1 5′ ss 4 | 1 | 0.1395 | 0.3405 | 0.35925 | 0.017 | 0.0385 | 0.074 | 659 |
| 554 | BIN1 3′ ss 5 | BIN1 5′ ss 4 | 1, 4 | 0.12575 | 0.30075 | 0.3425 | 0.0205 | 0.028 | 0.02875 | 660 |
| 555 | BIN1 3′ ss 5 | BIN1 5′ ss 4 | 1, 3 | 0.12575 | 0.34575 | 0.42225 | 0.0135 | 0.0105 | 0.01375 | 661 |
| 556 | BIN1 3′ ss 5 | BIN1 5′ ss 4 | 1, 3, 4 | 0.1215 | 0.34325 | 0.306 | 0.019 | 0.0565 | 0.02875 | 662 |
| 557 | BIN1 3′ ss 5 | BIN1 5′ ss 4 | 1, 2 | 0.106 | 0.3285 | 0.3175 | 0.0135 | 0.01575 | 0.04125 | 663 |
| 558 | BIN1 3′ ss 5 | BIN1 5′ ss 4 | 1, 2, 4 | 0.14175 | 0.28475 | 0.39025 | 0.01375 | 0.008 | 0.0385 | 664 |
| 559 | BIN1 3′ ss 5 | BIN1 5′ ss 4 | 1, 2, 3 | 0.07375 | 0.25875 | 0.208 | 0.00925 | 0.00625 | 0.0215 | 665 |
| 560 | BIN1 3′ ss 5 | BIN1 5′ ss 4 | 1, 2, 3, 4 | 0.131 | 0.317 | 0.29975 | 0.01725 | 0.09925 | 0.019 | 666 |
| 561 | BIN1 3′ ss 5 | BIN1 5′ ss 5 | None | 0.1545 | 0.34175 | 0.432 | 0.01675 | 0.023 | 0.03675 | 667 |
| 562 | BIN1 3′ ss 5 | BIN1 5′ ss 5 | 4 | 0.1545 | 0.2495 | 0.35525 | 0.018 | 0.021 | 0.0405 | 668 |
| 563 | BIN1 3′ ss 5 | BIN1 5′ ss 5 | 3 | 0.11 | 0.21775 | 0.278 | 0.01 | 0.039 | 0.0145 | 669 |
| 564 | BIN1 3′ ss 5 | BIN1 5′ ss 5 | 3, 4 | 0.11525 | 0.25325 | 0.28125 | 0.0165 | 0.0125 | 0.0145 | 670 |
| 565 | BIN1 3′ ss 5 | BIN1 5′ ss 5 | 2 | 0.10825 | 0.2155 | 0.27025 | 0.01475 | 0.03375 | 0.07025 | 671 |
| 566 | BIN1 3′ ss 5 | BIN1 5′ ss 5 | 2, 4 | 0.13 | 0.231 | 0.22025 | 0.0205 | 0.01525 | 0.0285 | 672 |
| 567 | BIN1 3′ ss 5 | BIN1 5′ ss 5 | 2, 3 | 0.106 | 0.22075 | 0.239 | 0.01325 | 0.0205 | 0.047 | 673 |
| 568 | BIN1 3′ ss 5 | BIN1 5′ ss 5 | 2, 3, 4 | 0.06825 | 0.10925 | 0.1765 | 0.00875 | 0.03025 | 0.0115 | 674 |
| 569 | BIN1 3′ ss 5 | BIN1 5′ ss 5 | 1 | 0.11325 | 0.26 | 0.2895 | 0.01575 | 0.04325 | 0.03975 | 675 |
| 570 | BIN1 3′ ss 5 | BIN1 5′ ss 5 | 1, 4 | 0.11975 | 0.24825 | 0.3225 | 0.0145 | 0.01325 | 0.0115 | 676 |
| 571 | BIN1 3′ ss 5 | BIN1 5′ ss 5 | 1, 3 | 0.117 | 0.2405 | 0.26775 | 0.01125 | 0.00625 | 0.0685 | 677 |
| 572 | BIN1 3′ ss 5 | BIN1 5′ ss 5 | 1, 3, 4 | 0.093 | 0.17225 | 0.259 | 0.0105 | 0.00825 | 0.011 | 678 |
| 573 | BIN1 3′ ss 5 | BIN1 5′ ss 5 | 1, 2 | 0.1075 | 0.21175 | 0.23775 | 0.01325 | 0.00525 | 0.08925 | 679 |
| 574 | BIN1 3′ ss 5 | BIN1 5′ ss 5 | 1, 2, 4 | 0.10075 | 0.19875 | 0.284 | 0.00825 | 0.006 | 0.0205 | 680 |
| 575 | BIN1 3′ ss 5 | BIN1 5′ ss 5 | 1, 2, 3 | 0.08025 | 0.2045 | 0.30025 | 0.0085 | 0.01375 | 0.0185 | 681 |
| 576 | BIN1 3′ ss 5 | BIN1 5′ ss 5 | 1, 2, 3, 4 | 0.07125 | 0.13475 | 0.1995 | 0.01325 | 0.035 | 0.06275 | 682 |
| 577 | BIN1 3′ ss 6 | Compensated | None | 0.2045 | 0.53725 | 0.601 | 0.023 | 0.0275 | 0.0495 | 683 |
| 578 | BIN1 3′ ss 6 | Compensated | 4 | 0.25275 | 0.7255 | 0.56525 | 0.02125 | 0.03125 | 0.0065 | 684 |
| 579 | BIN1 3′ ss 6 | Compensated | 3 | 0.14 | 0.37825 | 0.3735 | 0.02075 | 0.06375 | 0.05025 | 685 |
| 580 | BIN1 3′ ss 6 | Compensated | 3, 4 | 0.234 | 0.535 | 0.5115 | 0.03125 | 0.05775 | 0.05625 | 686 |
| 581 | BIN1 3′ ss 6 | Compensated | 2 | 0.14675 | 0.46175 | 0.39125 | ND | ND | ND | 687 |
| 582 | BIN1 3′ ss 6 | Compensated | 2, 4 | 0.16225 | 0.41475 | 0.4525 | 0.0215 | 0.0555 | 0.04425 | 688 |
| 583 | BIN1 3′ ss 6 | Compensated | 2, 3 | 0.16375 | 0.5155 | 0.7095 | 0.01575 | 0.01725 | 0.009 | 689 |
| 584 | BIN1 3′ ss 6 | Compensated | 2, 3, 4 | 0.15875 | 0.44025 | 0.4205 | 0.01425 | 0.0095 | 0.02375 | 690 |
| 585 | BIN1 3′ ss 6 | Compensated | 1 | 0.13625 | 0.39725 | 0.4145 | 0.0265 | 0.09325 | 0.0605 | 691 |
| 586 | BIN1 3′ ss 6 | Compensated | 1, 4 | 0.22425 | 0.51825 | 0.69275 | 0.03125 | 0.05325 | 0.123 | 692 |
| 587 | BIN1 3′ ss 6 | Compensated | 1, 3 | ND | ND | ND | 0.026 | 0.03525 | 0.0335 | 693 |
| 588 | BIN1 3′ ss 6 | Compensated | 1, 3, 4 | 0.24575 | 0.53475 | 0.593 | 0.0315 | 0.03025 | 0.0135 | 694 |
| 589 | BIN1 3′ ss 6 | Compensated | 1, 2 | 0.20025 | 0.532 | 0.4635 | 0.017 | 0.08825 | 0.083 | 695 |
| 590 | BIN1 3′ ss 6 | Compensated | 1, 2, 4 | 0.21175 | 0.5855 | 0.50425 | ND | ND | ND | 696 |
| 591 | BIN1 3′ ss 6 | Compensated | 1, 2, 3 | 0.202 | 0.59375 | 0.5045 | ND | ND | ND | 697 |
| 592 | BIN1 3′ ss 6 | Compensated | 1, 2, 3, 4 | 0.2215 | 0.57275 | 0.64975 | ND | ND | ND | 698 |
| 593 | BIN1 3′ ss 6 | BIN1 5′ ss 1 | None | 0.266 | 0.727 | 0.52925 | 0.04025 | 0.07675 | 0.03525 | 699 |
| 594 | BIN1 3′ ss 6 | BIN1 5′ ss 1 | 4 | 0.33975 | 0.6995 | 0.6715 | ND | ND | ND | 700 |
| 595 | BIN1 3′ ss 6 | BIN1 5′ ss 1 | 3 | 0.3185 | 0.6365 | 0.61675 | 0.064 | 0.158333333 | 0.0995 | 701 |
| 596 | BIN1 3′ ss 6 | BIN1 5′ ss 1 | 3, 4 | 0.40775 | 0.628 | 0.7695 | 0.0795 | 0.2155 | 0.26125 | 702 |
| 597 | BIN1 3′ ss 6 | BIN1 5′ ss 1 | 2 | 0.21 | 0.64975 | 0.59875 | 0.03725 | 0.18725 | 0.0815 | 703 |
| 598 | BIN1 3′ ss 6 | BIN1 5′ ss 1 | 2, 4 | 0.286 | 0.759 | 0.63725 | 0.05325 | 0.136 | 0.21125 | 704 |
| 599 | BIN1 3′ ss 6 | BIN1 5′ ss 1 | 2, 3 | 0.1865 | 0.694 | 0.721 | 0.02575 | 0.07125 | 0.36125 | 705 |
| 600 | BIN1 3′ ss 6 | BIN1 5′ ss 1 | 2, 3, 4 | 0.3825 | 0.667 | 0.69375 | 0.0565 | 0.1835 | 0.1665 | 706 |
| 601 | BIN1 3′ ss 6 | BIN1 5′ ss 1 | 1 | 0.383 | 0.75125 | 0.68525 | 0.065 | 0.20525 | 0.198 | 707 |
| 602 | BIN1 3′ ss 6 | BIN1 5′ ss 1 | 1, 4 | 0.38225 | 0.6425 | 0.69625 | 0.0725 | 0.078 | 0.1245 | 708 |
| 603 | BIN1 3′ ss 6 | BIN1 5′ ss 1 | 1, 3 | 0.28825 | 0.6565 | 0.2265 | 0.0785 | 0.093 | 0.16425 | 709 |
| 604 | BIN1 3′ ss 6 | BIN1 5′ ss 1 | 1, 3, 4 | 0.49825 | 0.77425 | 0.807 | 0.098 | 0.3345 | 0.22875 | 710 |
| 605 | BIN1 3′ ss 6 | BIN1 5′ ss 1 | 1, 2 | 0.295 | 0.619 | 0.67825 | 0.0405 | 0.116 | 0.1095 | 711 |
| 606 | BIN1 3′ ss 6 | BIN1 5′ ss 1 | 1, 2, 4 | ND | ND | ND | 0.0715 | 0.1135 | 0.2445 | 712 |
| 607 | BIN1 3′ ss 6 | BIN1 5′ ss 1 | 1, 2, 3 | 0.365 | 0.75975 | 0.861 | 0.06975 | 0.13475 | 0.362 | 713 |
| 608 | BIN1 3′ ss 6 | BIN1 5′ ss 1 | 1, 2, 3, 4 | 0.4105 | 0.73425 | 0.79475 | 0.07375 | 0.0255 | 0.040666667 | 714 |
| 609 | BIN1 3′ ss 6 | BIN1 5′ ss 2 | None | 0.17325 | 0.534 | 0.45675 | 0.01825 | 0.03275 | 0.05125 | 715 |
| 610 | BIN1 3′ ss 6 | BIN1 5′ ss 2 | 4 | 0.15525 | 0.41775 | 0.4715 | 0.02925 | 0.0175 | 0.068 | 716 |
| 611 | BIN1 3′ ss 6 | BIN1 5′ ss 2 | 3 | 0.10975 | 0.54975 | 0.521 | 0.01925 | 0.18625 | 0.04875 | 717 |
| 612 | BIN1 3′ ss 6 | BIN1 5′ ss 2 | 3, 4 | 0.17925 | 0.49275 | 0.43325 | 0.02075 | 0.11 | 0.07675 | 718 |
| 613 | BIN1 3′ ss 6 | BIN1 5′ ss 2 | 2 | 0.157 | 0.44875 | 0.45925 | 0.00925 | 0.332666667 | 0.026 | 719 |
| 614 | BIN1 3′ ss 6 | BIN1 5′ ss 2 | 2, 4 | 0.1645 | 0.4705 | 0.59575 | 0.0175 | 0.01775 | 0.128 | 720 |
| 615 | BIN1 3′ ss 6 | BIN1 5′ ss 2 | 2, 3 | 0.1075 | 0.45075 | 0.457 | 0.01375 | 0.187 | 0.09025 | 721 |
| 616 | BIN1 3′ ss 6 | BIN1 5′ ss 2 | 2, 3, 4 | 0.126 | 0.5125 | 0.4895 | 0.02875 | 0.10775 | 0.0315 | 722 |
| 617 | BIN1 3′ ss 6 | BIN1 5′ ss 2 | 1 | 0.1645 | 0.45775 | 0.4685 | 0.015 | 0.109 | 0.052 | 723 |
| 618 | BIN1 3′ ss 6 | BIN1 5′ ss 2 | 1, 4 | 0.16825 | 0.58375 | 0.54 | 0.0205 | 0.0255 | 0.138 | 724 |
| 619 | BIN1 3′ ss 6 | BIN1 5′ ss 2 | 1, 3 | 0.152 | 0.43275 | 0.5465 | 0.016 | 0.024 | 0.035 | 725 |
| 620 | BIN1 3′ ss 6 | BIN1 5′ ss 2 | 1, 3, 4 | 0.1715 | 0.529 | 0.44375 | 0.02125 | 0.03775 | 0.037 | 726 |
| 621 | BIN1 3′ ss 6 | BIN1 5′ ss 2 | 1, 2 | 0.13875 | 0.5345 | 0.5565 | 0.01225 | 0.11025 | 0.03175 | 727 |
| 622 | BIN1 3′ ss 6 | BIN1 5′ ss 2 | 1, 2, 4 | 0.14575 | 0.474 | 0.45075 | 0.02675 | 0.02725 | 0.0635 | 728 |
| 623 | BIN1 3′ ss 6 | BIN1 5′ ss 2 | 1, 2, 3 | 0.0845 | 0.5185 | 0.411 | 0.0155 | 0.07025 | 0.13625 | 729 |
| 624 | BIN1 3′ ss 6 | BIN1 5′ ss 2 | 1, 2, 3, 4 | 0.1835 | 0.59 | 0.62525 | 0.0165 | 0.18825 | 0.012 | 730 |
| 625 | BIN1 3′ ss 6 | BIN1 5′ ss 3 | None | 0.1945 | 0.44675 | 0.39975 | 0.021 | 0.031 | 0.0805 | 731 |
| 626 | BIN1 3′ ss 6 | BIN1 5′ ss 3 | 4 | 0.197 | 0.47725 | 0.43425 | 0.02325 | 0.0505 | 0.0265 | 732 |
| 627 | BIN1 3′ ss 6 | BIN1 5′ ss 3 | 3 | 0.1655 | 0.37425 | 0.5695 | 0.01325 | 0.02825 | 0.018 | 733 |
| 628 | BIN1 3′ ss 6 | BIN1 5′ ss 3 | 3, 4 | 0.19625 | 0.4055 | 0.47 | 0.0185 | 0.08025 | 0.024 | 734 |
| 629 | BIN1 3′ ss 6 | BIN1 5′ ss 3 | 2 | 0.109 | 0.322 | 0.342 | 0.014 | 0.03825 | 0.02375 | 735 |
| 630 | BIN1 3′ ss 6 | BIN1 5′ ss 3 | 2, 4 | 0.1775 | 0.51225 | 0.45325 | 0.0205 | 0.01275 | 0.01875 | 736 |
| 631 | BIN1 3′ ss 6 | BIN1 5′ ss 3 | 2, 3 | 0.11225 | 0.40175 | 0.4355 | 0.028 | 0.03725 | 0.024 | 737 |
| 632 | BIN1 3′ ss 6 | BIN1 5′ ss 3 | 2, 3, 4 | 0.2115 | 0.4055 | 0.45075 | 0.0215 | 0.08225 | 0.02125 | 738 |
| 633 | BIN1 3′ ss 6 | BIN1 5′ ss 3 | 1 | 0.1935 | 0.40925 | 0.546 | 0.0235 | 0.0335 | 0.01625 | 739 |
| 634 | BIN1 3′ ss 6 | BIN1 5′ ss 3 | 1, 4 | 0.1775 | 0.40325 | 0.41975 | 0.0285 | 0.06075 | 0.054 | 740 |
| 635 | BIN1 3′ ss 6 | BIN1 5′ ss 3 | 1, 3 | 0.1935 | 0.465 | 0.461 | 0.02925 | 0.058 | 0.087 | 741 |
| 636 | BIN1 3′ ss 6 | BIN1 5′ ss 3 | 1, 3, 4 | 0.23575 | 0.45425 | 0.483 | 0.02825 | 0.01725 | 0.059 | 742 |
| 637 | BIN1 3′ ss 6 | BIN1 5′ ss 3 | 1, 2 | 0.0655 | 0.2265 | 0.262 | 0.0155 | 0.02075 | 0.042 | 743 |
| 638 | BIN1 3′ ss 6 | BIN1 5′ ss 3 | 1, 2, 4 | 0.19425 | 0.53525 | 0.571 | 0.03575 | 0.11175 | 0.029 | 744 |
| 639 | BIN1 3′ ss 6 | BIN1 5′ ss 3 | 1, 2, 3 | 0.1205 | 0.413 | 0.4555 | 0.00625 | 0.0635 | 0.01075 | 745 |
| 640 | BIN1 3′ ss 6 | BIN1 5′ ss 3 | 1, 2, 3, 4 | 0.161 | 0.45025 | 0.38875 | 0.02525 | 0.08275 | 0.02275 | 746 |
| 641 | BIN1 3′ ss 6 | BIN1 5′ ss 4 | None | 0.159 | 0.44725 | 0.4755 | 0.0135 | 0.00725 | 0.0135 | 747 |
| 642 | BIN1 3′ ss 6 | BIN1 5′ ss 4 | 4 | 0.167 | 0.4315 | 0.346 | 0.0175 | 0.01 | 0.0525 | 748 |
| 643 | BIN1 3′ ss 6 | BIN1 5′ ss 4 | 3 | 0.1275 | 0.33675 | 0.4195 | 0.01075 | 0.01775 | 0.01375 | 749 |
| 644 | BIN1 3′ ss 6 | BIN1 5′ ss 4 | 3, 4 | 0.16375 | 0.429 | 0.3595 | 0.01725 | 0.018 | 0.045 | 750 |
| 645 | BIN1 3′ ss 6 | BIN1 5′ ss 4 | 2 | 0.134 | 0.359 | 0.4825 | 0.01575 | 0.01575 | 0.00825 | 751 |
| 646 | BIN1 3′ ss 6 | BIN1 5′ ss 4 | 2, 4 | 0.14175 | 0.34925 | 0.29025 | ND | ND | ND | 752 |
| 647 | BIN1 3′ ss 6 | BIN1 5′ ss 4 | 2, 3 | 0.08175 | 0.293 | 0.44025 | 0.0095 | 0.0195 | 0.0065 | 753 |
| 648 | BIN1 3′ ss 6 | BIN1 5′ ss 4 | 2, 3, 4 | 0.117 | 0.3805 | 0.42775 | 0.0145 | 0.013 | 0.111 | 754 |
| 649 | BIN1 3′ ss 6 | BIN1 5′ ss 4 | 1 | 0.1705 | 0.39625 | 0.393 | 0.015 | 0.04525 | 0.0065 | 755 |
| 650 | BIN1 3′ ss 6 | BIN1 5′ ss 4 | 1, 4 | 0.177 | 0.43 | 0.39275 | 0.02225 | 0.13275 | 0.014 | 756 |
| 651 | BIN1 3′ ss 6 | BIN1 5′ ss 4 | 1, 3 | 0.1255 | 0.32375 | 0.27275 | 0.00975 | 0.01375 | 0.025 | 757 |
| 652 | BIN1 3′ ss 6 | BIN1 5′ ss 4 | 1, 3, 4 | 0.147 | 0.32075 | 0.3555 | 0.01975 | 0.04675 | 0.0345 | 758 |
| 653 | BIN1 3′ ss 6 | BIN1 5′ ss 4 | 1, 2 | 0.13075 | 0.4335 | 0.4885 | 0.01725 | 0.048 | 0.02425 | 759 |
| 654 | BIN1 3′ ss 6 | BIN1 5′ ss 4 | 1, 2, 4 | ND | ND | ND | 0.01275 | 0.022 | 0.01875 | 760 |
| 655 | BIN1 3′ ss 6 | BIN1 5′ ss 4 | 1, 2, 3 | 0.117 | 0.416 | 0.46 | 0.01275 | 0.03725 | 0.00775 | 761 |
| 656 | BIN1 3′ ss 6 | BIN1 5′ ss 4 | 1, 2, 3, 4 | 0.155 | 0.49075 | 0.465 | 0.0185 | 0.02475 | 0.02425 | 762 |
| 657 | BIN1 3′ ss 6 | BIN1 5′ ss 5 | None | 0.1105 | 0.25275 | 0.376 | 0.0245 | 0.02525 | 0.01475 | 763 |
| 658 | BIN1 3′ ss 6 | BIN1 5′ ss 5 | 4 | 0.106 | 0.26475 | 0.2935 | 0.0215 | 0.01975 | 0.02175 | 764 |
| 659 | BIN1 3′ ss 6 | BIN1 5′ ss 5 | 3 | 0.101 | 0.244 | 0.2915 | 0.013 | 0.0505 | 0.00825 | 765 |
| 660 | BIN1 3′ ss 6 | BIN1 5′ ss 5 | 3, 4 | 0.13475 | 0.23175 | 0.4885 | 0.01025 | 0.0065 | 0.09375 | 766 |
| 661 | BIN1 3′ ss 6 | BIN1 5′ ss 5 | 2 | 0.06725 | 0.289 | 0.386 | 0.01275 | 0.02875 | 0.00675 | 767 |
| 662 | BIN1 3′ ss 6 | BIN1 5′ ss 5 | 2, 4 | 0.1085 | 0.3745 | 0.249 | 0.014 | 0.00525 | 0.00375 | 768 |
| 663 | BIN1 3′ ss 6 | BIN1 5′ ss 5 | 2, 3 | 0.09625 | 0.2725 | 0.251 | 0.011 | 0.015 | 0.00975 | 769 |
| 664 | BIN1 3′ ss 6 | BIN1 5′ ss 5 | 2, 3, 4 | ND | ND | ND | 0.0075 | 0.0135 | 0.04325 | 770 |
| 665 | BIN1 3′ ss 6 | BIN1 5′ ss 5 | 1 | 0.13 | 0.358 | 0.361 | 0.01775 | 0.00625 | 0.022 | 771 |
| 666 | BIN1 3′ ss 6 | BIN1 5′ ss 5 | 1, 4 | 0.133 | 0.39375 | 0.26025 | 0.01925 | 0.00825 | 0.01975 | 772 |
| 667 | BIN1 3′ ss 6 | BIN1 5′ ss 5 | 1, 3 | 0.11125 | 0.25725 | 0.32975 | 0.01675 | 0.009 | 0.015 | 773 |
| 668 | BIN1 3′ ss 6 | BIN1 5′ ss 5 | 1, 3, 4 | 0.0775 | 0.23325 | 0.3105 | 0.0125 | 0.00575 | 0.0095 | 774 |
| 669 | BIN1 3′ ss 6 | BIN1 5′ ss 5 | 1, 2 | 0.08325 | 0.32275 | 0.287 | 0.0065 | 0.014 | 0.06825 | 775 |
| 670 | BIN1 3′ ss 6 | BIN1 5′ ss 5 | 1, 2, 4 | 0.09725 | 0.183 | 0.166666667 | 0.0105 | 0.0055 | 0.014 | 776 |
| 671 | BIN1 3′ ss 6 | BIN1 5′ ss 5 | 1, 2, 3 | ND | ND | ND | 0.0095 | 0.01125 | 0.02125 | 777 |
| 672 | BIN1 3′ ss 6 | BIN1 5′ ss 5 | 1, 2, 3, 4 | 0.1015 | 0.295 | 0.36275 | 0.009 | 0.004 | 0.051 | 778 |

**The columns for Table 4 are further described as follows:
ID: (Variant ID): an identification number for each specific BIN1 alternative exon cassette variant.
3′ splice site ID: an identification number for each 3′ splice site, as indicated in FIG. 19.
3′ splice site ID: an identification number for each 5′ splice site, as indicated in FIG. 19.
Intron insertions: The locations of specific intronic modifications within each variant, as listed in FIG. 20.
MTM1_Heart: psi of the variant in heart when linked to the MTM1 cargo.
MTM1_Gastroc: psi of the variant in gastrocnemius when linked to the MTM1 cargo.
MTM1_Tibialis: psi of the variant in tibialis when linked to the MTM1 cargo.
CAPN3_Heart: psi of the variant in heart when linked to the CAPN3 cargo
CAPN3_Gastroc: psi of the variant in gastrocnemius when linked to the CAPN3 cargo
CAPN3_Tibialis: psi of the variant in tibialis when linked to the CAPN3 cargo
SEQ ID NO: the sequence identifier associated with the intron-exon-intron sequence of the particular cassette variant.

Application of this High Throughput Screening Approach to Identify Alternative Exon Cassettes with Regulated Splicing Patterns in Additional Tissues

[0607] The ability to limit or augment gene expression in a variety of tissues would be useful for gene therapies, and some notable tissues include the liver, different brain regions, dorsal root ganglia (DRG), skeletal muscle, cardiac muscle, and smooth muscle. GTEX data was mined as well as a human DRG-specific dataset (SRA runs SRR8533960-SRR8533986) to identify 110 alternative exons that show differential inclusion in these tissues (Table 5), and 96 exon cassettes were selected to test for splicing behavior within these tissues. A similar procedure as outlined above was followed; alternative exons that are <200 nucleotides in length were selected, all ATGs within the alternative exon body were removed, and the end of each alternative exon was modified to terminate in ATG. The 5′ splice sites of the new exons were scored and new variants for each alternative exon cassette were designed that were 1 bit weaker, similar, and 1 bit stronger than the endogenous 5′ splice site in the absence of adjustments to generate a new ATG. −500 nucleotides of total sequence were included from each alternative exon cassette, including the alternative exon itself and immediately flanking intronic regions, and were cloned into the SMN1 exon 6/intron 7 context (as above). EGFP was used as the downstream cargo (rather than MTM1). A similar 10 nucleotide barcode was incorporated into the EGFP coding sequence to allow for identification of each alternative exon cassette. Two versions of the library were generated; one driven by an MHCK7 promoter to bias expression towards cardiac, smooth, and skeletal muscles, and the other driven by a CBh promoter to drive ubiquitous expression. The MHCK7 promoter-driven construct will be packaged by the eMyoAAV capsid to bias delivery to muscle, whereas the CBh promoter-driven construct will be packaged by the PHP.eB capsid (25) to bias delivery to the nervous system, including DRG.

TABLE 5
Part 1 (Columns 1-18): Table of exons screened to characterize behavior across multiple tissues.

| | | | | | | | Exon | | |
|---|---|---|---|---|---|---|---|---|---|
| | | | | | | | sequence | | |
| | | | | | | | (with | | |
| | | | | | | | internal | | |
| | | | | | Native | | ATGs | | |
| | | | | | 5′ | | removed | Compensated | |
| | | | Upstream | | splice | Native | and ATG | 5′ splice | |
| | | | intron | Exon | site | 5′ | at the | site | |
| | | | sequence | sequence | sequence | splice | end) | sequence | Compensated |
| | | Exon | by SEQ | by SEQ | by SEQ | site | by SEQ | by SEQ | 5′ splice |
| Coordinates | Gene | Length | ID NO: | ID NO: | ID NO: | score | ID NO: | ID NO: | site score |
| chr1_114739891_114741526_114741674_114749820 | CSDE1 | 147 | 779 | 889 | 999 | 7.96 | 1109 | 1219 | 7.82 |
| chr1_149010596_149012590_149012777_149016298 | PDE4DIP | 186 | 780 | 890 | 1000 | 5.89 | 1110 | 1220 | 5.88 |
| chr1_150625809_150626478_150626527_150627311 | ENSA | 48 | 781 | 891 | 1001 | 6.18 | 1111 | 1221 | 6.18 |
| chr1_154157722_154169304_154169384_154170399 | TPM3 | 79 | 782 | 892 | 1002 | 2.73 | 1112 | 1222 | 2.73 |
| chr1_168004794_168015780_168015952_168019544 | DCAF6 | 171 | 783 | 893 | 1003 | 3.49 | 1113 | 1223 | 3.5 |
| chr1_168015952_168019544_168019668_168022987 | DCAF6 | 123 | 784 | 894 | 1004 | 9.79 | 1114 | 1224 | 9.89 |
| chr1_19148627_19149762_19149796_19150576 | UBR4 | 33 | 785 | 895 | 1005 | 6.1 | 1115 | 1225 | 6.1 |
| chr1_19339618_19342751_19342865_19344357 | CAPZB | 113 | 786 | 896 | 1006 | 8.63 | 1116 | 1226 | 8.6 |
| chr1_29053313_29058588_29058646_29060421 | EPB41 | 57 | 787 | 897 | 1007 | 7.44 | 1117 | 1227 | 7.42 |
| chr1_46583330_46585873_46585975_46594112 | MKNK1 | 101 | 788 | 898 | 1008 | 7.04 | 1118 | 1228 | 7.07 |
| chr1_51750196_51756319_51756359_51760689 | OSBPL9 | 39 | 789 | 899 | 1009 | 8.65 | 1119 | 1229 | 8.6 |
| chr10_122228009_122229345_122229487_122237394 | TACC2 | 141 | 790 | 900 | 1010 | 7.44 | 1120 | 1230 | 7.42 |
| chr10_13597536_13597644_13597672_13600243 | PRPF18 | 27 | 791 | 901 | 1011 | 8.55 | 1121 | 1231 | 8.57 |
| chr10_24474061_24494499_24494605_24495146 | KIAA1217 | 105 | 792 | 902 | 1012 | 6.02 | 1122 | 1232 | 6.05 |
| chr10_24536894_24542506_24542543_24542692 | KIAA1217 | 36 | 793 | 903 | 1013 | 8.14 | 1123 | 1233 | 8.21 |
| chr10_29524716_29526960_29527057_29529704 | SVIL | 96 | 794 | 904 | 1014 | 9.04 | 1124 | 1234 | 9.26 |
| chr10_310093_311536_311567_327005 | DIP2C | 30 | 795 | 905 | 1015 | 9.46 | 1125 | 1235 | 9.48 |
| chr10_60042760_60053676_60053728_60055657 | ANK3 | 51 | 796 | 906 | 1016 | 8.38 | 1126 | 1236 | 8.35 |
| chr10_73388415_73396043_73396110_73396518 | ANXA7 | 66 | 797 | 907 | 1017 | 7.97 | 1127 | 1237 | 7.82 |
| chr10_76877891_76884988_76885018_76887290 | KCNMA1 | 29 | 798 | 908 | 1018 | 9.11 | 1128 | 1238 | 9.26 |
| chr10_7802855_7806973_7807011_7807658 | ATP5C1 | 37 | 799 | 909 | 1019 | 8.27 | 1129 | 1239 | 8.27 |
| chr10_95367700_95371325_95371428_95375972 | SORBS1 | 102 | 800 | 910 | 1020 | 7.51 | 1130 | 1240 | 7.42 |
| chr10_95367700_95371983_95372050_95375972 | SORBS1 | 66 | 801 | 911 | 1021 | 8.83 | 1131 | 1241 | 8.6 |
| chr10_95384286_95395000_95395076_95397219 | SORBS1 | 75 | 802 | 912 | 1022 | 7.87 | 1132 | 1242 | 7.82 |
| chr10_95432577_95434621_95434718_95437489 | SORBS1 | 96 | 803 | 913 | 1023 | 7.33 | 1133 | 1243 | 7.42 |
| chr11_113805047_113806488_113806585_113808297 | USP28 | 96 | 804 | 914 | 1024 | 7.56 | 1134 | 1244 | 7.61 |
| chr11_115178776_115198405_115198439_115214607 | CADM1 | 33 | 805 | 915 | 1025 | 6.35 | 1135 | 1245 | 6.41 |
| chr11_12239586_12243986_12244113_12249183 | MICAL2 | 126 | 806 | 916 | 1026 | 6.44 | 1136 | 1246 | 6.41 |
| chr11_65344070_65344579_65344622_65345665 | DPF2 | 42 | 807 | 917 | 1027 | 5.82 | 1137 | 1247 | 5.88 |
| chr11_70378196_70382087_70382159_70383002 | PPFIA1 | 71 | 808 | 918 | 1028 | 9.27 | 1138 | 1248 | 9.26 |
| chr11_73420000_73425021_73425049_73430689 | FAM168A | 27 | 809 | 919 | 1029 | 6.66 | 1139 | 1249 | 6.66 |
| chr11_7639871_7641032_7641066_7641478 | PPFIBP2 | 33 | 810 | 920 | 1030 | 5.9 | 1140 | 1250 | 5.88 |
| chr12_101680530_101684381_101684425_101685581 | MYBPC1 | 43 | 811 | 921 | 1031 | 10.22 | 1141 | 1251 | 10.13 |
| chr12_122341698_122347374_122347480_122352725 | CLIP1 | 105 | 812 | 922 | 1032 | 5.98 | 1142 | 1252 | 6.05 |
| chr12_128899288_128906906_128906955_128912423 | GLT1D1 | 48 | 813 | 923 | 1033 | 9.6 | 1143 | 1253 | 9.48 |
| chr12_39311554_39315931_39315971_39319905 | KIF21A | 39 | 814 | 924 | 1034 | 8.17 | 1144 | 1254 | 8.21 |
| chr12_39315971_39318072_39318202_39319905 | KIF21A | 129 | 815 | 925 | 1035 | 8.07 | 1145 | 1255 | 8.21 |
| chr12_55699990_55700261_55700394_55700898 | ITGA7 | 132 | 816 | 926 | 1036 | 4.44 | 1146 | 1256 | 4.52 |
| chr12_71157788_71277350_71277413_71282715 | TSPAN8 | 62 | 817 | 927 | 1037 | 8.34 | 1147 | 1257 | 8.35 |
| chr12_89591296_89598656_89598744_89599116 | ATP2B1 | 87 | 818 | 928 | 1038 | 2.78 | 1148 | 1258 | 2.77 |
| chr13_75312899_75324236_75324402_75326196 | TBC1D4 | 165 | 819 | 929 | 1039 | 9.22 | 1149 | 1259 | 9.26 |
| chr13_75836458_75838139_75838197_75840084 | LMO7 | 57 | 820 | 930 | 1040 | 8.14 | 1150 | 1260 | 8.21 |
| chr13_75838197_75838346_75838389_75840084 | LMO7 | 42 | 821 | 931 | 1041 | 4.46 | 1151 | 1261 | 4.52 |
| chr14_100831535_100835738_100835880_100836166 | MEG3 | 141 | 822 | 932 | 1042 | 6.29 | 1152 | 1262 | 6.18 |
| chr14_35690004_35700161_35700303_35721687 | RALGAPA1 | 141 | 823 | 933 | 1043 | 6.13 | 1153 | 1263 | 6.1 |
| chr14_90593627_90603252_90603304_90610741 | TTC7B | 51 | 824 | 934 | 1044 | 7.79 | 1154 | 1264 | 7.82 |
| chr15_20458448_20461191_20461343_20462342 | HERC2P3 | 151 | 825 | 935 | 1045 | 5.9 | 1155 | 1265 | 5.88 |
| chr15_33842036_33843487_33843575_33844861 | RYR3 | 87 | 826 | 936 | 1046 | 4.18 | 1156 | 1266 | 4.16 |
| chr15_47766678_47768580_47768749_47770496 | SEMA6D | 168 | 827 | 937 | 1047 | 9.16 | 1157 | 1267 | 9.26 |
| chr16_119256_123506_123546_124936 | NPRL3 | 39 | 828 | 938 | 1048 | 9.21 | 1158 | 1268 | 9.26 |
| chr16_2264761_2266109_22662172267662 | RNPS1 | 107 | 829 | 939 | 1049 | 8.68 | 1159 | 1269 | 8.6 |
| chr16_30201107_30201195_30201294_30202689 | SLX1A- | 98 | 830 | 940 | 1050 | 9.16 | 1160 | 1270 | 9.26 |
| | SULT1A3 | | | | | | | | |
| chr16_58509353_58510644_58510684_58511421 | NDRG4 | 39 | 831 | 941 | 1051 | 7.13 | 1161 | 1271 | 7.14 |
| chr17_17850953_17857768_17857856_17861475 | TOM1L2 | 87 | 832 | 942 | 1052 | 7.61 | 1162 | 1272 | 7.61 |
| chr17_73207257_73207701_73207740_73208313 | COG1 | 38 | 833 | 943 | 1053 | 3.4 | 1163 | 1273 | 3.39 |
| chr17_76089321_76090328_76090398_76091142 | EXOC7 | 69 | 834 | 944 | 1054 | 10.9 | 1164 | 1274 | 11.01 |
| chr17_76089321_76090328_76090482_76091142 | EXOC7 | 153 | 835 | 945 | 1055 | 10.9 | 1165 | 1275 | 11.01 |
| chr18_34882202_34884727_34884777_34890299 | DTNA | 49 | 836 | 946 | 1056 | 10.08 | 1166 | 1276 | 10.13 |
| chr18_5397427_5398020_5398144_5406776 | EPB41L3 | 123 | 837 | 947 | 1057 | 3.48 | 1167 | 1277 | 3.5 |
| chr18_58333893_58341677_58341798_58342905 | NEDD4L | 120 | 838 | 948 | 1058 | 7.66 | 1168 | 1278 | 7.61 |
| chr19_45297955_45298142_45298223_45299810 | MARK4 | 80 | 839 | 949 | 1059 | 9.14 | 1169 | 1279 | 9.26 |
| chr19_49146006_49146165_49146193_49148082 | PPFIA3 | 27 | 840 | 950 | 1060 | 9.46 | 1170 | 1280 | 9.48 |
| chr2_121410970_121418621_121418730_121425138 | CLASP1 | 108 | 841 | 951 | 1061 | 9.27 | 1171 | 1281 | 9.26 |
| chr2_127059156_127060595_127060641_127062114 | BIN1 | 45 | 842 | 952 | 1062 | 10.05 | 1172 | 1282 | 10.13 |
| chr2_171707378_171712766_171712827_171715327 | DYNC112 | 60 | 843 | 953 | 1063 | 2.65 | 1173 | 1283 | 2.63 |
| chr2_178535829_178536333_178536463_178537603 | TTN-AS1 | 129 | 844 | 954 | 1064 | 5.69 | 1174 | 1284 | 5.75 |
| chr2_237749325_237751199_237751272_237753308 | LRRFIP1 | 72 | 845 | 955 | 1065 | 7.87 | 1175 | 1285 | 7.82 |
| chr2_240771105_240772569_240772597_240773113 | KIF1A | 27 | 846 | 956 | 1066 | 2.42 | 1176 | 1286 | 2.42 |
| chr2_27094612_27094799_27094935_27096728 | KHK | 135 | 847 | 957 | 1067 | 7.47 | 1177 | 1287 | 7.42 |
| chr2_40177856_40178386_40178494_40428472 | SLC8A1 | 107 | 848 | 958 | 1068 | 5.87 | 1178 | 1288 | 5.88 |
| chr2_69350184_69354258_69354313_69354488 | GFPT1 | 54 | 849 | 959 | 1069 | 4.3 | 1179 | 1289 | 4.36 |
| chr2_86166645_86170748_86170842_86171207 | IMMT | 93 | 850 | 960 | 1070 | 4.8 | 1180 | 1290 | 4.79 |
| chr2_8737000_8747144_8747202_8747886 | KIDINS220 | 57 | 851 | 961 | 1071 | 5.98 | 1181 | 1291 | 6.05 |
| chr2_96605512_96606969_96607048_96608507 | KANSL3 | 78 | 852 | 962 | 1072 | 9.27 | 1182 | 1292 | 9.26 |
| chr3_111949076_111949701_111949891_111952571 | PHLDB2 | 189 | 853 | 963 | 1073 | 8.55 | 1183 | 1293 | 8.57 |
| chr3_111958296_111960144_111960181_111962107 | PHLDB2 | 36 | 854 | 964 | 1074 | 8.88 | 1184 | 1294 | 8.6 |
| chr3_121835392_121836644_121836795_121844452 | EAF2 | 150 | 855 | 965 | 1075 | 9.37 | 1185 | 1295 | 9.33 |
| chr3_180970359_180971074_180971156_180975312 | FXR1 | 81 | 856 | 966 | 1076 | 8.63 | 1186 | 1296 | 8.6 |
| chr3_37065943_37066223_37066326_37075023 | LRRFIP2 | 102 | 857 | 967 | 1077 | 9.81 | 1187 | 1297 | 9.89 |
| chr3_37066326_37072789_37072883_37075023 | LRRFIP2 | 93 | 858 | 968 | 1078 | 5.41 | 1188 | 1298 | 5.39 |
| chr3_37121692_37127629_37127681_37129062 | LRRFIP2 | 51 | 859 | 969 | 1079 | 6.99 | 1189 | 1299 | 7.07 |
| chr3_52679727_52681703_52681821_52682091 | PBRM1 | 117 | 860 | 970 | 1080 | 5.75 | 1190 | 1300 | 5.75 |
| chr3_62499269_62513637_62513707_62516058 | CADPS | 69 | 861 | 971 | 1081 | 7.9 | 1191 | 1301 | 7.82 |
| chr4_101026062_101029165_101029196_101032266 | PPP3CA | 30 | 862 | 972 | 1082 | 8.88 | 1192 | 1302 | 8.6 |
| chr4_113330471_113331971_113332071_113333053 | ANK2 | 99 | 863 | 973 | 1083 | 5.12 | 1193 | 1303 | 5.19 |
| chr4_113373450_113378089_113378182_113381456 | ANK2 | 92 | 864 | 974 | 1084 | 5.28 | 1194 | 1304 | 5.29 |
| chr4_113500512_113502935_113502978_113509637 | CAMK2D | 42 | 865 | 975 | 1085 | 6.8 | 1195 | 1305 | 6.85 |
| chr4_1802026_1802913_1803065_1803691 | FGFR3 | 151 | 866 | 976 | 1086 | 10.52 | 1196 | 1306 | 10.13 |
| chr4_185514338_185514702_185514891_185523361 | PDLIM3 | 188 | 867 | 977 | 1087 | 9.72 | 1197 | 1307 | 9.89 |
| chr4_42556041_42569160_42569206_42574618 | ATP8A1 | 45 | 868 | 978 | 1088 | 9.26 | 1198 | 1308 | 9.26 |
| chr4_8009103_8019617_8019672_8029655 | ABLIM2 | 54 | 869 | 979 | 1089 | 8.21 | 1199 | 1309 | 8.21 |
| chr4_82829059_82830936_82830976_82842139 | SEC31A | 39 | 870 | 980 | 1090 | 6.38 | 1200 | 1310 | 6.41 |
| chr5_103187377_103189166_103189227_103190841 | PPIP5K2 | 60 | 871 | 981 | 1091 | 7.64 | 1201 | 1311 | 7.61 |
| chr5_88823928_88882954_88883000_88887501 | MEF2C | 45 | 872 | 982 | 1092 | 8.31 | 1202 | 1312 | 8.35 |
| chr6_138433681_138441982_138442115_138447000 | NHSL1 | 132 | 873 | 983 | 1093 | 7.37 | 1203 | 1313 | 7.42 |
| chr6_160143650_160155974_160156075_160158515 | SLC22A1 | 100 | 874 | 984 | 1094 | 4.41 | 1204 | 1314 | 4.36 |
| chr6_29608734_29609228_29609380_29610923 | GABBR1 | 151 | 875 | 985 | 1095 | 10.91 | 1205 | 1315 | 11.01 |
| chr6_54160433_54160739_54160800_54169527 | MLIP | 60 | 876 | 986 | 1096 | 6.93 | 1206 | 1316 | 6.85 |
| chr6_56463765_56464684_56464757_56466077 | DST | 72 | 877 | 987 | 1097 | 2.04 | 1207 | 1317 | 2.04 |
| chr6_75892691_75894813_75894841_75895230 | MYO6 | 27 | 878 | 988 | 1098 | 5.17 | 1208 | 1318 | 5.19 |
| chr7_128849579_128849975_128850075_128850383 | FLNC | 99 | 879 | 989 | 1099 | 2.97 | 1209 | 1319 | 2.95 |
| chr7_44234677_44239588_44239664_44240706 | CAMK2B | 75 | 880 | 990 | 1100 | 7.24 | 1210 | 1320 | 7.23 |
| chr7_51184200_51187913_51187959_51190849 | COBL | 45 | 881 | 991 | 1101 | 8.04 | 1211 | 1321 | 8.21 |
| chr7_74743521_74744138_74744251_74744757 | GTF21 | 112 | 882 | 992 | 1102 | 6.38 | 1212 | 1322 | 6.41 |
| chr7_81997251_82001658_82001716_82005422 | CACNA2D1 | 57 | 883 | 993 | 1103 | 8.63 | 1213 | 1323 | 8.6 |
| chr8_11861480_11864375_11864484_11868000 | CTSB | 108 | 884 | 994 | 1104 | 8.01 | 1214 | 1324 | 7.82 |
| chr8_22528578_22531301_22531329_22532224 | PPP3CC | 27 | 885 | 995 | 1105 | 8.33 | 1215 | 1325 | 8.35 |
| chr9_105512937_105513598_105513632_105534495 | FSD1L | 33 | 886 | 996 | 1106 | 5.22 | 1216 | 1326 | 5.19 |
| chrX_103962724_103964227_103964295_103964505 | TMSB15B | 67 | 887 | 997 | 1107 | 9.48 | 1217 | 1327 | 9.48 |
| chrX_15827373_15840496_15840592_15845378 | AP1S2 | 95 | 888 | 998 | 1108 | 4.27 | 1218 | 1328 | 4.36 |
| | | | Downstream | | | | | | |
| | | | intron | | | 5′ | | 5′ | |
| | | | sequence | | | splice | | splice | |
| | | | (with | | | site | 5′ | site | 5′ |
| | | Downstream | compensated | | | (~1 bit | splice | (~1 bit | splice |
| | | intron | 5′ splice | Kozak | | stronger) | site | weaker) | site |
| | | sequence | site) | sequence | Kozak | sequence | score | sequence | score |
| | | by SEQ | by SEQ | by SEQ | sequence | by SEQ | (~1 bit | by SEQ | (~1 bit |
| Coordinates | Gene | ID NO: | ID NO: | ID NO: | score | ID NO: | stronger) | ID NO: | weaker) |
| chr1_114739891_114741526_114741674_114749820 | CSDE1 | 1329 | 1439 | 1549 | 75 | 1659 | 9.26 | 1769 | 7.07 |
| chr1_149010596_149012590_149012777_149016298 | PDE4DIP | 1330 | 1440 | 1550 | 74 | 1660 | 6.85 | 1770 | 4.88 |
| chr1_150625809_150626478_150626527_150627311 | ENSA | 1331 | 1441 | 1551 | 53 | 1661 | 7.14 | 1771 | 5.19 |
| chr1_154157722_154169304_154169384_154170399 | TPM3 | 1332 | 1442 | 1552 | 57 | 1662 | 3.85 | 1772 | 1.72 |
| chr1_168004794_168015780_168015952_168019544 | DCAF6 | 1333 | 1443 | 1553 | 38 | 1663 | 4.52 | 1773 | 2.49 |
| chr1_168015952_168019544_168019668_168022987 | DCAF6 | 1334 | 1444 | 1554 | 76 | 1664 | 11.01 | 1774 | 8.6 |
| chr1_19148627_19149762_19149796_19150576 | UBR4 | 1335 | 1445 | 1555 | 79 | 1665 | 7.07 | 1775 | 5.05 |
| chr1_19339618_19342751_19342865_19344357 | CAPZB | 1336 | 1446 | 1556 | 86 | 1666 | 9.48 | 1776 | 7.61 |
| chr1_29053313_29058588_29058646_29060421 | EPB41 | 1337 | 1447 | 1557 | 76 | 1667 | 8.35 | 1777 | 6.41 |
| chr1_46583330_46585873_46585975_46594112 | MKNK1 | 1338 | 1448 | 1558 | 57 | 1668 | 8.21 | 1778 | 6.05 |
| chr1_51750196_51756319_51756359_51760689 | OSBPL9 | 1339 | 1449 | 1559 | 81 | 1669 | 9.48 | 1779 | 7.61 |
| chr10_122228009_122229345_122229487_122237394 | TACC2 | 1340 | 1450 | 1560 | 59 | 1670 | 8.35 | 1780 | 6.41 |
| chr10_13597536_13597644_13597672_13600243 | PRPF18 | 1341 | 1451 | 1561 | 79 | 1671 | 9.48 | 1781 | 7.61 |
| chr10_24474061_24494499_24494605_24495146 | KIAA1217 | 1342 | 1452 | 1562 | 84 | 1672 | 7.07 | 1782 | 5.05 |
| chr10_24536894_24542506_24542543_24542692 | KIAA1217 | 1343 | 1453 | 1563 | 48 | 1673 | 9.26 | 1783 | 7.14 |
| chr10_29524716_29526960_29527057_29529704 | SVIL | 1344 | 1454 | 1564 | 39 | 1674 | 10.13 | 1784 | 8.21 |
| chr10_310093_311536_311567_327005 | DIP2C | 1345 | 1455 | 1565 | 76 | 1675 | 10.13 | 1785 | 8.57 |
| chr10_60042760_60053676_60053728_60055657 | ANK3 | 1346 | 1456 | 1566 | 27 | 1676 | 9.33 | 1786 | 7.42 |
| chr10_73388415_73396043_73396110_73396518 | ANXA7 | 1347 | 1457 | 1567 | 85 | 1677 | 9.26 | 1787 | 7.07 |
| chr10_76877891_76884988_76885018_76887290 | KCNMA1 | 1348 | 1458 | 1568 | 77 | 1678 | 10.13 | 1788 | 8.21 |
| chr10_7802855_7806973_7807011_7807658 | ATP5C1 | 1349 | 1459 | 1569 | 79 | 1679 | 9.26 | 1789 | 7.23 |
| chr10_95367700_95371325_95371428_95375972 | SORBS1 | 1350 | 1460 | 1570 | 71 | 1680 | 8.57 | 1790 | 6.49 |
| chr10_95367700_95371983_95372050_95375972 | SORBS1 | 1351 | 1461 | 1571 | 71 | 1681 | 9.89 | 1791 | 7.82 |
| chr10_95384286_95395000_95395076_95397219 | SORBS1 | 1352 | 1462 | 1572 | 63 | 1682 | 8.6 | 1792 | 6.85 |
| chr10_95432577_95434621_95434718_95437489 | SORBS1 | 1353 | 1463 | 1573 | 74 | 1683 | 8.35 | 1793 | 6.41 |
| chr11_113805047_113806488_113806585_113808297 | USP28 | 1354 | 1464 | 1574 | 70 | 1684 | 8.57 | 1794 | 6.56 |
| chr11_115178776_115198405_115198439_115214607 | CADM1 | 1355 | 1465 | 1575 | 30 | 1685 | 7.42 | 1795 | 5.31 |
| chr11_12239586_12243986_12244113_12249183 | MICAL2 | 1356 | 1466 | 1576 | 85 | 1686 | 7.42 | 1796 | 5.46 |
| chr11_65344070_65344579_65344622_65345665 | DPF2 | 1357 | 1467 | 1577 | 86 | 1687 | 6.85 | 1797 | 4.84 |
| chr11_70378196_70382087_70382159_70383002 | PPFIA1 | 1358 | 1468 | 1578 | 65 | 1688 | 10.13 | 1798 | 8.27 |
| chr11_73420000_73425021_73425049_73430689 | FAM168A | 1359 | 1469 | 1579 | 33 | 1689 | 7.61 | 1799 | 5.75 |
| chr11_7639871_7641032_7641066_7641478 | PPFIBP2 | 1360 | 1470 | 1580 | 32 | 1690 | 6.85 | 1800 | 4.9 |
| chr12_101680530_101684381_101684425_101685581 | MYBPC1 | 1361 | 1471 | 1581 | 53 | 1691 | 11.01 | 1801 | 9.26 |
| chr12_122341698_122347374_122347480_122352725 | CLIP1 | 1362 | 1472 | 1582 | 79 | 1692 | 7.07 | 1802 | 5.05 |
| chr12_128899288_128906906_128906955_128912423 | GLT1D1 | 1363 | 1473 | 1583 | 70 | 1693 | 11.01 | 1803 | 8.6 |
| chr12_39311554_39315931_39315971_39319905 | KIF21A | 1364 | 1474 | 1584 | 85 | 1694 | 9.26 | 1804 | 7.14 |
| chr12_39315971_39318072_39318202_39319905 | KIF21A | 1365 | 1475 | 1585 | 91 | 1695 | 9.26 | 1805 | 7.07 |
| chr12_55699990_55700261_55700394_55700898 | ITGA7 | 1366 | 1476 | 1586 | 79 | 1696 | 5.46 | 1806 | 3.39 |
| chr12_71157788_71277350_71277413_71282715 | TSPAN8 | 1367 | 1477 | 1587 | 69 | 1697 | 9.33 | 1807 | 7.42 |
| chr12_89591296_89598656_89598744_89599116 | ATP2B1 | 1368 | 1478 | 1588 | 36 | 1698 | 3.85 | 1808 | 1.72 |
| chr13_75312899_75324236_75324402_75326196 | TBC1D4 | 1369 | 1479 | 1589 | 79 | 1699 | 10.13 | 1809 | 8.21 |
| chr13_75836458_75838139_75838197_75840084 | LMO7 | 1370 | 1480 | 1590 | 83 | 1700 | 9.26 | 1810 | 7.14 |
| chr13_75838197_75838346_75838389_75840084 | LMO7 | 1371 | 1481 | 1591 | 50 | 1701 | 5.46 | 1811 | 3.5 |
| chr14_100831535_100835738_100835880_100836166 | MEG3 | 1372 | 1482 | 1592 | 71 | 1702 | 7.23 | 1812 | 5.29 |
| chr14_35690004_35700161_35700303_35721687 | RALGAPA1 | 1373 | 1483 | 1593 | 39 | 1703 | 7.14 | 1813 | 5.19 |
| chr14_90593627_90603252_90603304_90610741 | TTC7B | 1374 | 1484 | 1594 | 62 | 1704 | 8.6 | 1814 | 6.85 |
| chr15_20458448_20461191_20461343_20462342 | HERC2P3 | 1375 | 1485 | 1595 | 32 | 1705 | 6.85 | 1815 | 4.9 |
| chr15_33842036_33843487_33843575_33844861 | RYR3 | 1376 | 1486 | 1596 | 30 | 1706 | 5.19 | 1816 | 3.18 |
| chr15_47766678_47768580_47768749_47770496 | SEMA6D | 1377 | 1487 | 1597 | 80 | 1707 | 10.13 | 1817 | 8.21 |
| chr16_119256_123506_123546_124936 | NPRL3 | 1378 | 1488 | 1598 | 27 | 1708 | 10.13 | 1818 | 8.21 |
| chr16_2264761_2266109_22662172267662 | RNPS1 | 1379 | 1489 | 1599 | 80 | 1709 | 9.48 | 1819 | 7.61 |
| chr16_30201107_30201195_30201294_30202689 | SLX1A- | 1380 | 1490 | 1600 | 80 | 1710 | 10.13 | 1820 | 8.21 |
| | SULT1A3 | | | | | | | | |
| chr16_58509353_58510644_58510684_58511421 | NDRG4 | 1381 | 1491 | 1601 | 87 | 1711 | 8.21 | 1821 | 6.1 |
| chr17_17850953_17857768_17857856_17861475 | TOM1L2 | 1382 | 1492 | 1602 | 76 | 1712 | 8.6 | 1822 | 6.63 |
| chr17_73207257_73207701_73207740_73208313 | COG1 | 1383 | 1493 | 1603 | 54 | 1713 | 4.36 | 1823 | 2.4 |
| chr17_76089321_76090328_76090398_76091142 | EXOC7 | 1384 | 1494 | 1604 | 36 | 1714 | 11.01 | 1824 | 9.89 |
| chr17_76089321_76090328_76090482_76091142 | EXOC7 | 1385 | 1495 | 1605 | 36 | 1715 | 11.01 | 1825 | 9.89 |
| chr18_34882202_34884727_34884777_34890299 | DTNA | 1386 | 1496 | 1606 | 49 | 1716 | 11.01 | 1826 | 9.26 |
| chr18_5397427_5398020_5398144_5406776 | EPB41L3 | 1387 | 1497 | 1607 | 59 | 1717 | 4.52 | 1827 | 2.49 |
| chr18_58333893_58341677_58341798_58342905 | NEDD4L | 1388 | 1498 | 1608 | 55 | 1718 | 8.6 | 1828 | 6.66 |
| chr19_45297955_45298142_45298223_45299810 | MARK4 | 1389 | 1499 | 1609 | 87 | 1719 | 10.13 | 1829 | 8.21 |
| chr19_49146006_49146165_49146193_49148082 | PPFIA3 | 1390 | 1500 | 1610 | 74 | 1720 | 10.13 | 1830 | 8.57 |
| chr2_121410970_121418621_121418730_121425138 | CLASP1 | 1391 | 1501 | 1611 | 64 | 1721 | 10.13 | 1831 | 8.27 |
| chr2_127059156_127060595_127060641_127062114 | BIN1 | 1392 | 1502 | 1612 | 86 | 1722 | 11.01 | 1832 | 9.26 |
| chr2_171707378_171712766_171712827_171715327 | DYNC112 | 1393 | 1503 | 1613 | 33 | 1723 | 3.59 | 1833 | 1.69 |
| chr2_178535829_178536333_178536463_178537603 | TTN-AS1 | 1394 | 1504 | 1614 | 52 | 1724 | 6.66 | 1834 | 4.68 |
| chr2_237749325_237751199_237751272_237753308 | LRRFIP1 | 1395 | 1505 | 1615 | 76 | 1725 | 8.6 | 1835 | 6.85 |
| chr2_240771105_240772569_240772597_240773113 | KIF1A | 1396 | 1506 | 1616 | 64 | 1726 | 3.39 | 1836 | 1.35 |
| chr2_27094612_27094799_27094935_27096728 | KHK | 1397 | 1507 | 1617 | 52 | 1727 | 8.57 | 1837 | 6.49 |
| chr2_40177856_40178386_40178494_40428472 | SLC8A1 | 1398 | 1508 | 1618 | 87 | 1728 | 6.85 | 1838 | 4.87 |
| chr2_69350184_69354258_69354313_69354488 | GFPT1 | 1399 | 1509 | 1619 | 86 | 1729 | 5.31 | 1839 | 3.32 |
| chr2_86166645_86170748_86170842_86171207 | IMMT | 1400 | 1510 | 1620 | 41 | 1730 | 5.75 | 1840 | 3.85 |
| chr2_8737000_8747144_8747202_8747886 | KIDINS220 | 1401 | 1511 | 1621 | 60 | 1731 | 7.07 | 1841 | 5.05 |
| chr2_96605512_96606969_96607048_96608507 | KANSL3 | 1402 | 1512 | 1622 | 59 | 1732 | 10.13 | 1842 | 8.27 |
| chr3_111949076_111949701_111949891_111952571 | PHLDB2 | 1403 | 1513 | 1623 | 73 | 1733 | 9.48 | 1843 | 7.61 |
| chr3_111958296_111960144_111960181_111962107 | PHLDB2 | 1404 | 1514 | 1624 | 78 | 1734 | 9.89 | 1844 | 7.82 |
| chr3_121835392_121836644_121836795_121844452 | EAF2 | 1405 | 1515 | 1625 | 35 | 1735 | 10.13 | 1845 | 8.35 |
| chr3_180970359_180971074_180971156_180975312 | FXR1 | 1406 | 1516 | 1626 | 67 | 1736 | 9.48 | 1846 | 7.61 |
| chr3_37065943_37066223_37066326_37075023 | LRRFIP2 | 1407 | 1517 | 1627 | 96 | 1737 | 11.01 | 1847 | 8.6 |
| chr3_37066326_37072789_37072883_37075023 | LRRFIP2 | 1408 | 1518 | 1628 | 69 | 1738 | 6.41 | 1848 | 4.36 |
| chr3_37121692_37127629_37127681_37129062 | LRRFIP2 | 1409 | 1519 | 1629 | 28 | 1739 | 7.82 | 1849 | 6.05 |
| chr3_52679727_52681703_52681821_52682091 | PBRM1 | 1410 | 1520 | 1630 | 69 | 1740 | 6.66 | 1850 | 4.79 |
| chr3_62499269_62513637_62513707_62516058 | CADPS | 1411 | 1521 | 1631 | 63 | 1741 | 8.6 | 1851 | 6.85 |
| chr4_101026062_101029165_101029196_101032266 | PPP3CA | 1412 | 1522 | 1632 | 70 | 1742 | 9.89 | 1852 | 7.82 |
| chr4_113330471_113331971_113332071_113333053 | ANK2 | 1413 | 1523 | 1633 | 44 | 1743 | 6.1 | 1853 | 4.14 |
| chr4_113373450_113378089_113378182_113381456 | ANK2 | 1414 | 1524 | 1634 | 45 | 1744 | 6.18 | 1854 | 4.36 |
| chr4_113500512_113502935_113502978_113509637 | CAMK2D | 1415 | 1525 | 1635 | 78 | 1745 | 7.82 | 1855 | 5.75 |
| chr4_1802026_1802913_1803065_1803691 | FGFR3 | 1416 | 1526 | 1636 | 75 | 1746 | 11.01 | 1856 | 9.48 |
| chr4_185514338_185514702_185514891_185523361 | PDLIM3 | 1417 | 1527 | 1637 | 72 | 1747 | 11.0 | 1857 | 8.6 |
| chr4_42556041_42569160_42569206_42574618 | ATP8A1 | 1418 | 1528 | 1638 | 50 | 1748 | 10.13 | 1858 | 8.27 |
| chr4_8009103_8019617_8019672_8029655 | ABLIM2 | 1419 | 1529 | 1639 | 67 | 1749 | 9.26 | 1859 | 7.23 |
| chr4_82829059_82830936_82830976_82842139 | SEC31A | 1420 | 1530 | 1640 | 29 | 1750 | 7.42 | 1860 | 5.39 |
| chr5_103187377_103189166_103189227_103190841 | PPIP5K2 | 1421 | 1531 | 1641 | 74 | 1751 | 8.6 | 1861 | 6.63 |
| chr5_88823928_88882954_88883000_88887501 | MEF2C | 1422 | 1532 | 1642 | 52 | 1752 | 9.33 | 1862 | 7.23 |
| chr6_138433681_138441982_138442115_138447000 | NHSL1 | 1423 | 1533 | 1643 | 82 | 1753 | 8.35 | 1863 | 6.41 |
| chr6_160143650_160155974_160156075_160158515 | SLC22A1 | 1424 | 1534 | 1644 | 29 | 1754 | 5.39 | 1864 | 3.39 |
| chr6_29608734_29609228_29609380_29610923 | GABBR1 | 1425 | 1535 | 1645 | 40 | 1755 | 11.01 | 1865 | 9.89 |
| chr6_54160433_54160739_54160800_54169527 | MLIP | 1426 | 1536 | 1646 | 90 | 1756 | 7.82 | 1866 | 5.88 |
| chr6_56463765_56464684_56464757_56466077 | DST | 1427 | 1537 | 1647 | 70 | 1757 | 3.06 | 1867 | 1.05 |
| chr6_75892691_75894813_75894841_75895230 | MYO6 | 1428 | 1538 | 1648 | 44 | 1758 | 6.18 | 1868 | 4.16 |
| chr7_128849579_128849975_128850075_128850383 | FLNC | 1429 | 1539 | 1649 | 74 | 1759 | 4.01 | 1869 | 1.95 |
| chr7_44234677_44239588_44239664_44240706 | CAMK2B | 1430 | 1540 | 1650 | 76 | 1760 | 8.27 | 1870 | 6.18 |
| chr7_51184200_51187913_51187959_51190849 | COBL | 1431 | 1541 | 1651 | 73 | 1761 | 9.26 | 1871 | 7.07 |
| chr7_74743521_74744138_74744251_74744757 | GTF21 | 1432 | 1542 | 1652 | 87 | 1762 | 7.42 | 1872 | 5.39 |
| chr7_81997251_82001658_82001716_82005422 | CACNA2D1 | 1433 | 1543 | 1653 | 69 | 1763 | 9.48 | 1873 | 7.61 |
| chr8_11861480_11864375_11864484_11868000 | CTSB | 1434 | 1544 | 1654 | 63 | 1764 | 9.26 | 1874 | 7.07 |
| chr8_22528578_22531301_22531329_22532224 | PPP3CC | 1435 | 1545 | 1655 | 89 | 1765 | 9.33 | 1875 | 7.42 |
| chr9_105512937_105513598_105513632_105534495 | FSD1L | 1436 | 1546 | 1656 | 58 | 1766 | 6.18 | 1876 | 4.16 |
| chrX_103962724_103964227_103964295_103964505 | TMSB15B | 1437 | 1547 | 1657 | 75 | 1767 | 10.13 | 1877 | 8.57 |
| chrX_15827373_15840496_15840592_15845378 | AP1S2 | 1438 | 1548 | 1658 | 35 | 1768 | 5.29 | 1878 | 3.28 |

TABLE 5
Part 2 (Columns 1, 2, and 19-38): Table of exons screened to characterize behavior across multiple tissues.

| | | | Brain - | | | | | | | |
|---|---|---|---|---|---|---|---|---|---|---|
| | | | Anterior | Brain - | | | | Brain - | | |
| | | | cingulate | Caudate | Brain - | | | Frontal | | |
| | | Brain - | cortex | (basal | Cerebellar | Brain - | Brain - | Cortex | Brain - | Brain - |
| | | Amygdala | (BA24) | ganglia) | Hemisphere | Cerebellum | Cortex | (BA9) | Hippocampus | Hypothalamus |
| Coordinates | Gene | (psi) | (psi) | (psi) | (psi) | (psi) | (psi) | (psi) | (psi) | (psi) |
| chr1_114739891_114741526_114741674_114749820 | CSDE1 | 0.06 | 0.05 | 0.05 | 0.02 | 0.02 | 0.04 | 0.04 | 0.07 | 0.05 |
| chr1_149010596_149012590_149012777_149016298 | PDE4DIP | 0.29 | 0.39 | 0.43 | 0.83 | 0.79 | 0.51 | 0.58 | 0.43 | 0.34 |
| chr1_150625809_150626478_150626527_150627311 | ENSA | ND | ND | ND | ND | ND | ND | ND | 0.86 | 0.33 |
| chr1_154157722_154169304_154169384_154170399 | TPM3 | 0.06 | 0.08 | 0.06 | 0.35 | 0.32 | 0.11 | 0.12 | 0.08 | 0.09 |
| chr1_168004794_168015780_168015952_168019544 | DCAF6 | 0.82 | 0.88 | 0.82 | ND | 0.18 | 0.73 | 0.77 | 0.77 | 0.77 |
| chr1_168015952_168019544_168019668_168022987 | DCAF6 | 0.09 | 0.12 | 0.09 | ND | 0.4 | 0.11 | 0.09 | 0 | 0.14 |
| chr1_19148627_19149762_19149796_19150576 | UBR4 | 0.19 | 0.35 | 0.21 | 0.81 | 0.76 | 0.41 | 0.47 | 0.25 | 0.36 |
| chr1_19339618_19342751_19342865_19344357 | CAPZB | 0.33 | 0.26 | 0.37 | 0.08 | 0.11 | 0.22 | 0.18 | 0.3 | 0.23 |
| chr1_29053313_29058588_29058646_29060421 | EPB41 | ND | ND | 0.9 | 0.99 | 0.99 | 0.85 | ND | ND | 0.95 |
| chr1_46583330_46585873_46585975_46594112 | MKNK1 | 0.39 | 0.42 | 0.31 | 0.32 | 0.32 | 0.5 | 0.5 | 0.38 | 0.23 |
| chr1_51750196_51756319_51756359_51760689 | OSBPL9 | 0.46 | 0.37 | 0.4 | 0.18 | 0.21 | 0.35 | 0.33 | 0.46 | 0.35 |
| chr10_122228009_122229345_122229487_122237394 | TACC2 | 0.61 | 0.72 | 0.69 | 0.81 | 0.81 | 0.78 | 0.8 | 0.63 | 0.65 |
| chr10_13597536_13597644_13597672_13600243 | PRPF18 | 0.27 | 0.35 | 0.29 | 0.45 | 0.44 | 0.44 | 0.49 | 0.29 | 0.07 |
| chr10_24474061_24494499_24494605_24495146 | KIAA1217 | 0.9 | 0.93 | 0.91 | 0.93 | 0.27 | 0.89 | 0.96 | 0.85 | 0.78 |
| chr10_24536894_24542506_24542543_24542692 | KIAA1217 | ND | ND | ND | ND | ND | ND | ND | ND | ND |
| chr10_29524716_29526960_29527057_29529704 | SVIL | 0.03 | ND | ND | 0.22 | 0.18 | 0.33 | 0.13 | ND | 0.46 |
| chr10_310093_311536_311567_327005 | DIP2C | 0.08 | 0.05 | 0.11 | 0.04 | 0.04 | 0.06 | 0.07 | 0.1 | 0.07 |
| chr10_60042760_60053676_60053728_60055657 | ANK3 | 0.01 | 0 | 0.01 | 0 | 0 | 0.01 | 0 | 0.01 | 0.01 |
| chr10_73388415_73396043_73396110_73396518 | ANXA7 | 0.31 | 0.41 | 0.29 | 0.83 | 0.75 | 0.44 | 0.55 | 0.39 | 0.45 |
| chr10_76877891_76884988_76885018_76887290 | KCNMA1 | 0.28 | 0.29 | 0.48 | 0.51 | 0.53 | 0.31 | 0.35 | 0.28 | 0.16 |
| chr10_7802855_7806973_7807011_7807658 | ATP5C1 | 0.92 | 0.94 | 0.94 | 0.98 | 0.97 | 0.95 | 0.96 | 0.91 | 0.93 |
| chr10_95367700_95371325_95371428_95375972 | SORBS1 | 0.07 | 0.18 | 0.21 | 0.59 | 0.43 | 0.23 | 0.31 | 0.08 | 0.1 |
| chr10_95367700_95371983_95372050_95375972 | SORBS1 | 0.08 | 0.12 | 0.12 | 0.38 | 0.23 | 0.11 | 0.13 | 0.08 | 0.1 |
| chr10_95384286_95395000_95395076_95397219 | SORBS1 | 0.73 | 0.7 | 0.7 | 0.43 | 0.55 | 0.68 | 0.6 | 0.65 | 0.67 |
| chr10_95432577_95434621_95434718_95437489 | SORBS1 | 0.66 | 0.55 | 0.53 | 0.35 | 0.46 | 0.52 | 0.45 | 0.64 | 0.63 |
| chr11_113805047_113806488_113806585_113808297 | USP28 | 0.48 | 0.7 | 0.5 | 0.89 | 0.89 | 0.76 | 0.79 | 0.49 | 0.56 |
| chr11_115178776_115198405_115198439_115214607 | CADM1 | 0.66 | 0.56 | 0.7 | 0.5 | 0.5 | 0.56 | 0.51 | 0.6 | 0.52 |
| chr11_12239586_12243986_12244113_12249183 | MICAL2 | 0.99 | 0.99 | 0.96 | 1 | 0.99 | 0.99 | 0.99 | 0.98 | 0.94 |
| chr11_65344070_65344579_65344622_65345665 | DPF2 | 0.35 | 0.41 | 0.36 | 0.88 | 0.85 | 0.49 | 0.53 | 0.44 | 0.48 |
| chr11_70378196_70382087_70382159_70383002 | PPFIA1 | 0.98 | 0.98 | 0.98 | 1 | 1 | 0.99 | 0.99 | 0.98 | 0.98 |
| chr11_73420000_73425021_73425049_73430689 | FAM168A | 0.9 | 0.91 | 0.87 | 0.83 | 0.84 | 0.91 | 0.9 | 0.87 | 0.85 |
| chr11_7639871_7641032_7641066_7641478 | PPFIBP2 | 0.31 | 0.31 | 0.27 | 0.66 | 0.61 | 0.36 | 0.37 | 0.3 | 0.26 |
| chr12_101680530_101684381_101684425_101685581 | MYBPC1 | 0.04 | 0.05 | 0.03 | 0.1 | 0.12 | 0.11 | 0.12 | 0.04 | 0.02 |
| chr12_122341698_122347374_122347480_122352725 | CLIP1 | 0.49 | 0.62 | 0.45 | 0.79 | 0.78 | 0.6 | 0.65 | 0.48 | 0.58 |
| chr12_128899288_128906906_128906955_128912423 | GLT1D1 | 0.05 | 0.04 | 0.12 | 0.05 | 0.05 | 0.05 | 0.05 | 0.03 | 0.02 |
| chr12_39311554_39315931_39315971_39319905 | KIF21A | 0.42 | 0.41 | 0.37 | 0.72 | 0.59 | 0.38 | 0.47 | 0.48 | 0.65 |
| chr12_39315971_39318072_39318202_39319905 | KIF21A | 0.62 | 0.8 | 0.7 | 0.95 | 0.94 | 0.81 | 0.87 | 0.62 | 0.82 |
| chr12_55699990_55700261_55700394_55700898 | ITGA7 | 0.34 | 0.25 | 0.34 | 0.14 | 0.19 | 0.3 | 0.25 | 0.38 | 0.52 |
| chr12_71157788_71277350_71277413_71282715 | TSPAN8 | ND | ND | ND | ND | ND | ND | ND | ND | ND |
| chr12_89591296_89598656_89598744_89599116 | ATP2B1 | 0.46 | 0.69 | 0.67 | 0.78 | 0.76 | 0.78 | 0.8 | 0.57 | 0.47 |
| chr13_75312899_75324236_75324402_75326196 | TBC1D4 | 0.03 | 0.02 | 0.06 | 0.11 | 0.07 | 0.03 | 0.07 | 0.01 | 0.01 |
| chr13_75836458_75838139_75838197_75840084 | LMO7 | 0.97 | 0.98 | 0.99 | 0.99 | 0.99 | 0.99 | 0.99 | 0.97 | 0.97 |
| chr13_75838197_75838346_75838389_75840084 | LMO7 | 0.02 | 0.02 | 0.01 | 0.01 | 0.01 | 0.03 | 0.03 | 0.02 | 0.03 |
| chr14_100831535_100835738_100835880_100836166 | MEG3 | 0.03 | 0.03 | 0.02 | 0.02 | 0.02 | 0.03 | 0.03 | 0.02 | 0.01 |
| chr14_35690004_35700161_35700303_35721687 | RALGAPA1 | 0.71 | 0.86 | 0.71 | 0.94 | 0.92 | 0.82 | 0.85 | 0.8 | 0.81 |
| chr14_90593627_90603252_90603304_90610741 | TTC7B | 0.28 | 0.25 | 0.38 | 0.33 | 0.33 | 0.3 | 0.28 | 0.28 | 0.08 |
| chr15_20458448_20461191_20461343_20462342 | HERC2P3 | 0.04 | 0.04 | 0.03 | 0.11 | 0.07 | 0.03 | 0.03 | 0.06 | 0.04 |
| chr15_33842036_33843487_33843575_33844861 | RYR3 | 0.13 | 0.22 | 0.61 | 0.12 | 0.1 | 0.22 | 0.21 | 0.39 | 0.49 |
| chr15_47766678_47768580_47768749_47770496 | SEMA6D | 0.89 | 0.46 | 0.74 | 0.85 | 0.89 | 0.32 | 0.28 | 0.83 | 0.3 |
| chr16_119256_123506_123546_124936 | NPRL3 | 0.03 | 0.05 | 0.06 | 0.03 | 0.04 | 0.02 | 0.02 | 0.06 | 0.04 |
| chr16_2264761_2266109_22662172267662 | RNPS1 | 0.02 | 0.01 | 0.28 | 0.47 | 0.47 | 0.24 | 0.36 | ND | 0.11 |
| chr16_30201107_30201195_30201294_30202689 | SLX1A- | 0.02 | 0 | 0 | 0.06 | 0.05 | 0.03 | 0.04 | 0.01 | 0.02 |
| | SULT1A3 | | | | | | | | | |
| chr16_58509353_58510644_58510684_58511421 | NDRG4 | 0.05 | 0.06 | 0.13 | 0.1 | 0.1 | 0.09 | 0.11 | 0.06 | 0.07 |
| chr17_17850953_17857768_17857856_17861475 | TOM1L2 | 0.87 | 0.88 | 0.9 | 0.73 | 0.78 | 0.86 | 0.86 | 0.88 | 0.82 |
| chr17_73207257_73207701_73207740_73208313 | COG1 | 0.37 | 0.27 | 0.41 | 0.08 | 0.08 | 0.19 | 0.18 | 0.27 | 0.21 |
| chr17_76089321_76090328_76090398_76091142 | EXOC7 | 0.06 | 0.03 | 0.06 | 0.05 | 0.06 | 0.03 | 0.04 | 0.08 | 0.06 |
| chr17_76089321_76090328_76090482_76091142 | EXOC7 | 0.04 | 0.02 | 0.04 | 0.04 | 0.04 | 0.02 | 0.02 | 0.05 | 0.04 |
| chr18_34882202_34884727_34884777_34890299 | DTNA | 0.98 | 0.98 | 0.98 | 0.98 | 0.98 | 0.98 | 0.98 | 0.99 | 0.98 |
| chr18_5397427_5398020_5398144_5406776 | EPB41L3 | 0.42 | 0.7 | 0.44 | 0.94 | 0.94 | 0.76 | 0.8 | 0.43 | 0.65 |
| chr18_58333893_58341677_58341798_58342905 | NEDD4L | 0.97 | 0.97 | 0.97 | 0.96 | 0.96 | 0.97 | 0.98 | 0.98 | 0.98 |
| chr19_45297955_45298142_45298223_45299810 | MARK4 | 0.68 | 0.8 | 0.74 | 0.89 | 0.88 | 0.84 | 0.84 | 0.73 | 0.72 |
| chr19_49146006_49146165_49146193_49148082 | PPFIA3 | 0.91 | 0.93 | 0.88 | 0.99 | 0.98 | 0.96 | 0.96 | 0.91 | 0.92 |
| chr2_121410970_121418621_121418730_121425138 | CLASP1 | 0.17 | 0.34 | 0.22 | 0.57 | 0.52 | 0.38 | 0.46 | 0.27 | 0.29 |
| chr2_127059156_127060595_127060641_127062114 | BIN1 | 0 | 0.01 | 0.01 | 0.01 | 0.01 | 0.01 | 0.01 | 0 | 0 |
| chr2_171707378_171712766_171712827_171715327 | DYNC112 | 0.13 | 0.34 | 0.19 | 0.82 | 0.75 | 0.42 | 0.47 | 0.14 | 0.31 |
| chr2_178535829_178536333_178536463_178537603 | TTN-AS1 | ND | ND | ND | ND | ND | ND | ND | ND | ND |
| chr2_237749325_237751199_237751272_237753308 | LRRFIP1 | 0.08 | 0.06 | 0.07 | 0.02 | 0.03 | 0.04 | 0.04 | 0.07 | 0.05 |
| chr2_240771105_240772569_240772597_240773113 | KIF1A | 0.55 | 0.68 | 0.4 | 0.63 | 0.61 | 0.69 | 0.71 | 0.49 | 0.38 |
| chr2_27094612_27094799_27094935_27096728 | KHK | 0 | 0 | 0 | 0 | 0 | 0 | 0 | 0 | 0 |
| chr2_40177856_40178386_40178494_40428472 | SLC8A1 | 0.24 | 0.9 | 0.38 | ND | ND | 0.92 | 0.94 | 0.74 | 0.79 |
| chr2_69350184_69354258_69354313_69354488 | GFPT1 | 0.01 | 0.06 | 0.04 | 0.05 | 0.1 | 0.08 | 0.06 | 0.01 | 0.05 |
| chr2_86166645_86170748_86170842_86171207 | IMMT | 0.99 | 0.99 | 0.99 | 1 | 0.99 | 0.99 | 1 | 0.99 | 1 |
| chr2_8737000_8747144_8747202_8747886 | KIDINS220 | 0.47 | 0.56 | 0.52 | 0.41 | 0.73 | 0.57 | 0.55 | 0.3 | 0.28 |
| chr2_96605512_96606969_96607048_96608507 | KANSL3 | 0.6 | 0.66 | 0.52 | 0.94 | 0.92 | 0.71 | 0.74 | 0.66 | 0.68 |
| chr3_111949076_111949701_111949891_111952571 | PHLDB2 | ND | ND | ND | ND | ND | 0.01 | ND | ND | ND |
| chr3_111958296_111960144_111960181_111962107 | PHLDB2 | ND | 0.02 | ND | ND | ND | 0 | ND | ND | ND |
| chr3_121835392_121836644_121836795_121844452 | EAF2 | 0.6 | 0.63 | 0.55 | 0.73 | 0.72 | 0.71 | 0.73 | 0.71 | 0.65 |
| chr3_180970359_180971074_180971156_180975312 | FXR1 | 0.15 | 0.15 | 0.17 | 0.06 | 0.09 | 0.14 | 0.11 | 0.11 | 0.1 |
| chr3_37065943_37066223_37066326_37075023 | LRRFIP2 | 0.67 | 0.71 | 0.63 | 0.94 | 0.93 | 0.78 | 0.79 | 0.72 | 0.74 |
| chr3_37066326_37072789_37072883_37075023 | LRRFIP2 | 0.15 | 0.17 | 0.18 | 0.18 | 0.18 | 0.16 | 0.14 | 0.14 | 0.14 |
| chr3_37121692_37127629_37127681_37129062 | LRRFIP2 | 0 | ND | ND | ND | ND | ND | 0.01 | 0.02 | 0.03 |
| chr3_52679727_52681703_52681821_52682091 | PBRM1 | ND | ND | ND | 1 | ND | ND | ND | ND | ND |
| chr3_62499269_62513637_62513707_62516058 | CADPS | 0.96 | 0.96 | 0.85 | 0.79 | 0.8 | 0.96 | 0.94 | 0.96 | 0.81 |
| chr4_101026062_101029165_101029196_101032266 | PPP3CA | 0.68 | 0.8 | 0.83 | 0.68 | 0.69 | 0.83 | 0.84 | 0.66 | 0.57 |
| chr4_113330471_113331971_113332071_113333053 | ANK2 | 0.17 | 0.35 | 0.19 | 0.71 | 0.58 | 0.34 | 0.46 | 0.21 | 0.34 |
| chr4_113373450_113378089_113378182_113381456 | ANK2 | 0 | 0 | 0 | 0 | 0 | 0 | 0 | 0 | 0 |
| chr4_113500512_113502935_113502978_113509637 | CAMK2D | 0.6 | 0.67 | 0.29 | 0.97 | 0.94 | 0.63 | 0.75 | 0.44 | 0.65 |
| chr4_1802026_1802913_1803065_1803691 | FGFR3 | 0.02 | 0.02 | 0.02 | 0.02 | 0.03 | 0.02 | 0.02 | 0.03 | 0.03 |
| chr4_185514338_185514702_185514891_185523361 | PDLIM3 | 0.83 | 0.82 | 0.8 | 0.9 | 0.9 | 0.82 | 0.83 | 0.8 | 0.85 |
| chr4_42556041_42569160_42569206_42574618 | ATP8A1 | 0.28 | 0.71 | 0.56 | 0.94 | 0.89 | 0.48 | 0.78 | 0.3 | 0.61 |
| chr4_8009103_8019617_8019672_8029655 | ABLIM2 | 0.74 | 0.79 | 0.72 | 0.69 | 0.7 | 0.78 | 0.79 | 0.71 | 0.76 |
| chr4_82829059_82830936_82830976_82842139 | SEC31A | 0.05 | 0.05 | 0.04 | 0.06 | 0.06 | 0.06 | 0.07 | 0.06 | 0.05 |
| chr5_103187377_103189166_103189227_103190841 | PPIP5K2 | 0.33 | 0.25 | 0.37 | 0.21 | 0.21 | 0.23 | 0.22 | 0.09 | 0.32 |
| chr5_88823928_88882954_88883000_88887501 | MEF2C | 0.95 | 0.92 | 0.95 | 1 | ND | 0.93 | 0.94 | 0.96 | 0.99 |
| chr6_138433681_138441982_138442115_138447000 | NHSL1 | 0.05 | 0.16 | 0.12 | ND | ND | ND | ND | ND | 0.18 |
| chr6_160143650_160155974_160156075_160158515 | SLC22A1 | 0.87 | ND | ND | ND | ND | ND | ND | ND | ND |
| chr6_29608734_29609228_29609380_29610923 | GABBR1 | 0.94 | 0.96 | 0.93 | 0.99 | 0.97 | 0.94 | 0.96 | 0.93 | 0.95 |
| chr6_54160433_54160739_54160800_54169527 | MLIP | 0.09 | 0.13 | 0.01 | ND | ND | 0.17 | 0.16 | 0.15 | 0.06 |
| chr6_56463765_56464684_56464757_56466077 | DST | 0.4 | 0.5 | 0.4 | 0.65 | 0.63 | 0.56 | 0.6 | 0.45 | 0.53 |
| chr6_75892691_75894813_75894841_75895230 | MYO6 | 0.03 | 0.01 | 0.01 | ND | ND | 0.02 | 0.01 | 0.02 | 0.01 |
| chr7_128849579_128849975_128850075_128850383 | FLNC | 0.48 | 0.42 | 0.55 | 0.94 | 0.83 | 0.5 | 0.43 | 0.33 | 0.36 |
| chr7_44234677_44239588_44239664_44240706 | CAMK2B | 0.83 | 0.87 | 0.93 | 0.98 | 0.97 | 0.92 | 0.92 | 0.91 | 0.66 |
| chr7_51184200_51187913_51187959_51190849 | COBL | 0 | 0 | 0.01 | 0 | 0 | 0 | 0.01 | 0 | 0 |
| chr7_74743521_74744138_74744251_74744757 | GTF21 | 0.89 | 0.78 | 0.89 | 0.58 | 0.49 | 0.86 | 0.87 | 0.92 | 0.92 |
| chr7_81997251_82001658_82001716_82005422 | CACNA2D1 | ND | 0 | 0 | 0 | 0 | 0.01 | 0 | ND | 0 |
| chr8_11861480_11864375_11864484_11868000 | CTSB | 0.96 | 0.93 | 0.93 | 0.99 | ND | 0.93 | 0.93 | 0.98 | 0.99 |
| chr8_22528578_22531301_22531329_22532224 | PPP3CC | 0 | 0 | 0 | 0 | 0 | 0 | 0 | 0 | 0 |
| chr9_105512937_105513598_105513632_105534495 | FSD1L | ND | 0.01 | ND | 0.04 | ND | 0.08 | 0.06 | ND | 0.57 |
| chrX_103962724_103964227_103964295_103964505 | TMSB15B | ND | ND | ND | 0.96 | 0.97 | ND | ND | ND | 0.87 |
| chrX_15827373_15840496_15840592_15845378 | AP1S2 | 0.08 | 0.13 | 0.05 | 0.08 | 0.01 | 0.08 | 0.14 | 0.05 | 0.02 |

| | | Brain - | | Brain - | | | | | | | | |
|---|---|---|---|---|---|---|---|---|---|---|---|---|
| | | Nucleus | Brain - | Spinal | | | | | | | | |
| | | accumbens | Putamen | cord | Brain - | | | Heart - | Heart - | | | |
| | | (basal | (basal | (cervical | Substantia | Colon - | Colon - | Atrial | Left | | Muscle - | |
| | | ganglia) | ganglia) | c-1) | nigra | Sigmoid | Transverse | Appendage | Ventricle | Liver | Skeletal | DRG |
| Coordinates | Gene | (psi) | (psi) | (psi) | (psi) | (psi) | (psi) | (psi) | (psi) | (psi) | (psi) | (psi) |
| chr1_114739891_114741526_114741674_114749820 | CSDE1 | 0.04 | 0.05 | 0.18 | 0.09 | 0.08 | 0.04 | 0.57 | 0.62 | 0.01 | 0.94 | 0.05 |
| chr1_149010596_149012590_149012777_149016298 | PDE4DIP | 0.47 | 0.46 | 0.13 | 0.13 | 0.17 | 0.07 | 0.93 | 0.97 | 0 | 1 | 0.76 |
| chr1_150625809_150626478_150626527_150627311 | ENSA | 0.91 | ND | ND | ND | 0.96 | 0.91 | ND | ND | 0.91 | 0.07 | ND |
| chr1_154157722_154169304_154169384_154170399 | TPM3 | 0.05 | 0.08 | 0.16 | 0.14 | 0.04 | 0.02 | 0.57 | 0.36 | 0.03 | 0.97 | 0.21 |
| chr1_168004794_168015780_168015952_168019544 | DCAF6 | 0.71 | 0.88 | 0.66 | 0.93 | 0.59 | 0.58 | 0.92 | 0.95 | 0.08 | 0.99 | 0.77 |
| chr1_168015952_168019544_168019668_168022987 | DCAF6 | 0.19 | 0.09 | 0.2 | ND | 0.17 | 0.19 | 0.03 | 0.02 | 0.81 | 0 | 0.15 |
| chr1_19148627_19149762_19149796_19150576 | UBR4 | 0.36 | 0.23 | 0.07 | 0.11 | 0.04 | 0.03 | 0.25 | 0.36 | 0 | 0.85 | 0.19 |
| chr1_19339618_19342751_19342865_19344357 | CAPZB | 0.35 | 0.39 | 0.58 | 0.42 | 0.35 | 0.15 | 0.51 | 0.57 | 0.01 | 0.84 | 0.11 |
| chr1_29053313_29058588_29058646_29060421 | EPB41 | 0.79 | 0.87 | 1 | 1 | 0.09 | 0.44 | 0.04 | 0.01 | 0.35 | 0.01 | 0.84 |
| chr1_46583330_46585873_46585975_46594112 | MKNK1 | 0.41 | 0.36 | 0.14 | 0.12 | 0.34 | 0.2 | 0.39 | 0.58 | 0.06 | 0.89 | 0.19 |
| chr1_51750196_51756319_51756359_51760689 | OSBPL9 | 0.3 | 0.41 | 0.42 | 0.42 | 0.63 | 0.76 | 0.57 | 0.43 | 0.96 | 0.15 | 0.29 |
| chr10_122228009_122229345_122229487_122237394 | TACC2 | 0.78 | 0.74 | 0.52 | 0.49 | 0.03 | 0.02 | 0.76 | 0.76 | 0.01 | 0.94 | 0.32 |
| chr10_13597536_13597644_13597672_13600243 | PRPF18 | 0.41 | 0.33 | 0.04 | 0.05 | 0 | 0 | 0.1 | 0.15 | 0 | 0.82 | 0.4 |
| chr10_24474061_24494499_24494605_24495146 | KIAA1217 | 0.89 | 0.9 | 0.59 | 0.59 | 0.33 | 0.63 | 0.51 | 0.57 | 0.92 | 0.06 | 0.14 |
| chr10_24536894_24542506_24542543_24542692 | KIAA1217 | ND | ND | ND | ND | 0 | 0.01 | 0.33 | 0.42 | 0.01 | 0.83 | ND |
| chr10_29524716_29526960_29527057_29529704 | SVIL | 0.51 | ND | 0.58 | 0.27 | 0.38 | 0.31 | 0.82 | 0.9 | 0.09 | 0.99 | 0.48 |
| chr10_310093_311536_311567_327005 | DIP2C | 0.08 | 0.11 | 0.08 | 0.11 | 0.21 | 0.19 | 0.11 | 0.05 | 0.16 | 0.94 | 0.59 |
| chr10_60042760_60053676_60053728_60055657 | ANK3 | 0.01 | 0.01 | 0.01 | 0.01 | 0.01 | 0.01 | 0.06 | 0.07 | 0.01 | 0.96 | 0.04 |
| chr10_73388415_73396043_73396110_73396518 | ANXA7 | 0.39 | 0.28 | 0.37 | 0.25 | 0.02 | 0.01 | 0.52 | 0.59 | 0.01 | 0.92 | 0.36 |
| chr10_76877891_76884988_76885018_76887290 | KCNMA1 | 0.39 | 0.54 | 0.38 | 0.47 | 0.08 | 0.07 | ND | ND | ND | 0.14 | 0.94 |
| chr10_7802855_7806973_7807011_7807658 | ATP5C1 | 0.95 | 0.93 | 0.86 | 0.91 | 0.45 | 0.72 | 0.04 | 0.04 | 0.97 | 0.02 | 0.82 |
| chr10_95367700_95371325_95371428_95375972 | SORBS1 | 0.3 | 0.22 | 0.02 | 0.02 | 0.07 | 0.08 | 0.33 | 0.46 | 0.08 | 0.96 | 0.13 |
| chr10_95367700_95371983_95372050_95375972 | SORBS1 | 0.16 | 0.1 | 0.05 | 0.06 | 0.06 | 0.05 | 0.32 | 0.46 | 0.13 | 0.96 | 0.06 |
| chr10_95384286_95395000_95395076_95397219 | SORBS1 | 0.67 | 0.67 | 0.72 | 0.69 | 0.04 | 0.04 | 0.65 | 0.73 | 0.01 | 0.87 | 0.25 |
| chr10_95432577_95434621_95434718_95437489 | SORBS1 | 0.47 | 0.54 | 0.67 | 0.68 | 0.1 | 0.1 | 0.74 | 0.87 | 0.04 | 0.9 | 0.17 |
| chr11_113805047_113806488_113806585_113808297 | USP28 | 0.51 | 0.5 | 0.52 | 0.47 | 0.05 | 0.04 | 0.83 | 0.88 | 0.05 | 0.91 | 0.35 |
| chr11_115178776_115198405_115198439_115214607 | CADM1 | 0.46 | 0.73 | 0.65 | 0.65 | ND | ND | 0.06 | 0.06 | 0.98 | 0.4 | 0.68 |
| chr11_12239586_12243986_12244113_12249183 | MICAL2 | 0.98 | 0.96 | 0.88 | 0.83 | 0.11 | 0.06 | 0.85 | 0.92 | 0 | 0.95 | ND |
| chr11_65344070_65344579_65344622_65345665 | DPF2 | 0.48 | 0.38 | 0.56 | 0.37 | 0.14 | 0.1 | 0.54 | 0.63 | 0.05 | 0.88 | 0.53 |
| chr11_70378196_70382087_70382159_70383002 | PPFIA1 | 0.99 | 0.98 | 0.97 | 0.98 | 0.52 | 0.76 | 0.47 | 0.43 | 0.99 | 0.14 | 0.71 |
| chr11_73420000_73425021_73425049_73430689 | FAM168A | 0.91 | 0.88 | 0.89 | 0.87 | 0.18 | 0.15 | 0.6 | 0.61 | 0.02 | 0.53 | 0.71 |
| chr11_7639871_7641032_7641066_7641478 | PPFIBP2 | 0.3 | 0.25 | 0.25 | 0.25 | 0.02 | 0 | 0.41 | 0.51 | 0 | 0.85 | 0.1 |
| chr12_101680530_101684381_101684425_101685581 | MYBPC1 | 0.02 | 0.02 | 0.03 | 0.01 | 0.55 | 0.15 | 0.27 | 0.82 | 0.92 | 0.95 | 0.06 |
| chr12_122341698_122347374_122347480_122352725 | CLIP1 | 0.47 | 0.49 | 0.44 | 0.52 | 0.14 | 0.12 | 0.48 | 0.7 | 0.07 | 0.91 | 0.38 |
| chr12_128899288_128906906_128906955_128912423 | GLT1D1 | 0.1 | 0.13 | 0.22 | 0.07 | ND | ND | ND | 0.86 | 0.01 | 0.99 | 0.79 |
| chr12_39311554_39315931_39315971_39319905 | KIF21A | 0.41 | 0.43 | 0.6 | 0.56 | 0.29 | 0.11 | 0.67 | 0.8 | 0.07 | 0.96 | 0.57 |
| chr12_39315971_39318072_39318202_39319905 | KIF21A | 0.8 | 0.66 | 0.4 | 0.61 | 0.93 | 0.94 | 0.26 | 0.24 | 0.86 | 0.16 | 0.97 |
| chr12_55699990_55700261_55700394_55700898 | ITGA7 | 0.29 | 0.44 | 0.56 | 0.56 | 0.97 | 0.96 | 0.21 | 0.31 | 0.89 | 0.13 | 0.22 |
| chr12_71157788_71277350_71277413_71282715 | TSPAN8 | ND | ND | ND | ND | 0 | 0 | ND | ND | ND | 0.96 | ND |
| chr12_89591296_89598656_89598744_89599116 | ATP2B1 | 0.78 | 0.7 | 0.22 | 0.2 | 0.01 | 0 | 0.21 | 0.44 | 0.01 | 0.83 | 0.03 |
| chr13_75312899_75324236_75324402_75326196 | TBC1D4 | 0.04 | 0.01 | 0.01 | 0.04 | 0 | 0 | 0.74 | 0.87 | 0.01 | 0.96 | ND |
| chr13_75836458_75838139_75838197_75840084 | LMO7 | 0.99 | 0.99 | 0.65 | 0.94 | 0.96 | 0.98 | 0.72 | 0.54 | 0.98 | 0.04 | 0.7 |
| chr13_75838197_75838346_75838389_75840084 | LMO7 | 0.01 | 0.02 | 0.15 | 0.08 | 0.01 | 0.01 | 0.94 | 0.97 | 0 | 0.61 | 0.25 |
| chr14_100831535_100835738_100835880_100836166 | MEG3 | 0.02 | 0.03 | 0.04 | 0.02 | 0.48 | 0.67 | 0.82 | 0.85 | 0.9 | 0.7 | 0.06 |
| chr14_35690004_35700161_35700303_35721687 | RALGAPA1 | 0.84 | 0.8 | 0.8 | 0.8 | 0.05 | 0.03 | 0.63 | 0.78 | ND | 0.91 | 0.93 |
| chr14_90593627_90603252_90603304_90610741 | TTC7B | 0.44 | 0.37 | 0.07 | 0.05 | 0.8 | 0.7 | 0.66 | 0.69 | 0.05 | 0.88 | 0.11 |
| chr15_20458448_20461191_20461343_20462342 | HERC2P3 | 0.02 | 0.03 | 0.07 | 0.05 | 0.03 | 0.04 | 0.03 | 0.04 | 0.01 | 0.08 | 0.96 |
| chr15_33842036_33843487_33843575_33844861 | RYR3 | 0.51 | 0.55 | 0.15 | 0.19 | 0.03 | 0.03 | ND | ND | ND | 0.95 | ND |
| chr15_47766678_47768580_47768749_47770496 | SEMA6D | 0.66 | 0.77 | 0.72 | 0.46 | 0.63 | 0.15 | 0.96 | 0.94 | ND | 0.97 | 0.15 |
| chr16_119256_123506_123546_124936 | NPRL3 | 0.06 | 0.06 | 0.04 | 0.04 | 0.38 | 0.42 | 0.47 | 0.53 | 0.88 | 0.41 | 0.13 |
| chr16_2264761_2266109_22662172267662 | RNPS1 | 0.04 | 0.29 | 0.01 | 0.24 | 0.04 | 0.05 | 0.19 | 0.56 | ND | 0.87 | ND |
| chr16_30201107_30201195_30201294_30202689 | SLX1A- | 0 | 0 | 0 | 0.01 | 0.02 | 0.07 | 0.02 | 0.01 | ND | 0.07 | 0.92 |
| | SULT1A3 | | | | | | | | | | | |
| chr16_58509353_58510644_58510684_58511421 | NDRG4 | 0.11 | 0.11 | 0.14 | 0.08 | 0.52 | 0.48 | 0.01 | 0.01 | ND | 0.18 | 0.98 |
| chr17_17850953_17857768_17857856_17861475 | TOM1L2 | 0.89 | 0.88 | 0.91 | 0.86 | 0.33 | 0.19 | 0.85 | 0.85 | 0.02 | 0.62 | 0.67 |
| chr17_73207257_73207701_73207740_73208313 | COG1 | 0.55 | 0.33 | 0.05 | 0.06 | 0.06 | 0.03 | 0.48 | 0.62 | 0.02 | 0.88 | 0.08 |
| chr17_76089321_76090328_76090398_76091142 | EXOC7 | 0.04 | 0.06 | 0.13 | 0.09 | 0.71 | 0.86 | 0.14 | 0.15 | 0.97 | 0.44 | 0.13 |
| chr17_76089321_76090328_76090482_76091142 | EXOC7 | 0.03 | 0.05 | 0.08 | 0.06 | 0.64 | 0.87 | 0.09 | 0.09 | 0.96 | 0.31 | ND |
| chr18_34882202_34884727_34884777_34890299 | DTNA | 0.98 | 0.98 | 0.98 | 0.98 | 0.05 | 0.07 | 0.21 | 0.19 | 1 | 0.82 | 0.89 |
| chr18_5397427_5398020_5398144_5406776 | EPB41L3 | 0.51 | 0.41 | 0.53 | 0.49 | 0.12 | 0.08 | 0.05 | 0.02 | 0.01 | 0.65 | 0.87 |
| chr18_58333893_58341677_58341798_58342905 | NEDD4L | 0.99 | 0.93 | 0.87 | 0.86 | 0.98 | 0.99 | 0.18 | 0.19 | 1 | 0.24 | ND |
| chr19_45297955_45298142_45298223_45299810 | MARK4 | 0.77 | 0.74 | 0.28 | 0.5 | 0.09 | 0.06 | 0.5 | 0.61 | 0.05 | 0.88 | 0.82 |
| chr19_49146006_49146165_49146193_49148082 | PPFIA3 | 0.91 | 0.89 | 0.76 | 0.85 | 0.59 | 0.11 | 0.23 | 0.07 | ND | 0.03 | 0.93 |
| chr2_121410970_121418621_121418730_121425138 | CLASP1 | 0.21 | 0.18 | 0.1 | 0.35 | 0.02 | 0.02 | 0 | 0 | 0.02 | 0.01 | 0.83 |
| chr2_127059156_127060595_127060641_127062114 | BIN1 | 0.01 | 0.01 | 0 | 0 | 0.07 | 0.04 | 0.06 | 0.15 | 0.02 | 1 | 0.06 |
| chr2_171707378_171712766_171712827_171715327 | DYNC112 | 0.3 | 0.15 | 0.03 | 0.09 | 0.04 | 0.21 | 0 | 0 | 0.06 | 0 | 0.81 |
| chr2_178535829_178536333_178536463_178537603 | TTN-AS1 | ND | ND | ND | ND | 0 | 0.01 | 0.62 | 0.82 | ND | 0.94 | ND |
| chr2_237749325_237751199_237751272_237753308 | LRRFIP1 | 0.05 | 0.08 | 0.11 | 0.1 | 0.6 | 0.35 | 0.63 | 0.67 | 0.04 | 0.91 | 0.09 |
| chr2_240771105_240772569_240772597_240773113 | KIF1A | 0.43 | 0.34 | 0.12 | 0.26 | 0.47 | 0.47 | 0.01 | ND | ND | ND | 0.83 |
| chr2_27094612_27094799_27094935_27096728 | KHK | 0 | 0 | 0 | 0 | 0.01 | 0.09 | 0 | 0 | 0.87 | 0 | ND |
| chr2_40177856_40178386_40178494_40428472 | SLC8A1 | 0.62 | 0.4 | 0.48 | 0.81 | 0.03 | 0.03 | 0.85 | 0.93 | ND | ND | ND |
| chr2_69350184_69354258_69354313_69354488 | GFPT1 | 0.06 | 0.08 | 0.03 | 0.01 | 0.14 | 0.04 | 0.42 | 0.71 | 0.01 | 0.83 | 0.28 |
| chr2_86166645_86170748_86170842_86171207 | IMMT | 1 | 1 | 1 | 0.99 | 1 | 1 | 0.19 | 0.13 | 1 | 0.51 | 0.97 |
| chr2_8737000_8747144_8747202_8747886 | KIDINS220 | 0.55 | 0.41 | 0.14 | 0.21 | 0.03 | 0.02 | 0.31 | 0.64 | 0 | 0.83 | 0.32 |
| chr2_96605512_96606969_96607048_96608507 | KANSL3 | 0.62 | 0.59 | 0.66 | 0.59 | 0.09 | 0.05 | 0.43 | 0.6 | 0.05 | 0.91 | 0.54 |
| chr3_111949076_111949701_111949891_111952571 | PHLDB2 | ND | ND | 0 | ND | 0.03 | 0.02 | 0.55 | 0.9 | 0.01 | 0.84 | 0.08 |
| chr3_111958296_111960144_111960181_111962107 | PHLDB2 | ND | ND | ND | ND | 0 | 0 | 0.67 | 0.8 | ND | 0.92 | ND |
| chr3_121835392_121836644_121836795_121844452 | EAF2 | 0.53 | 0.55 | 0.76 | 0.65 | 0.07 | 0.05 | 0.63 | 0.84 | 0.02 | 0.88 | 0.64 |
| chr3_180970359_180971074_180971156_180975312 | FXR1 | 0.16 | 0.18 | 0.08 | 0.12 | 0.65 | 0.39 | 0.83 | 0.85 | 0.03 | 0.98 | 0.06 |
| chr3_37065943_37066223_37066326_37075023 | LRRFIP2 | 0.69 | 0.66 | 0.75 | 0.64 | 0.01 | 0.01 | 0.8 | 0.85 | 0.04 | 0.92 | 0.52 |
| chr3_37066326_37072789_37072883_37075023 | LRRFIP2 | 0.2 | 0.16 | 0.1 | 0.11 | ND | 0.92 | 0.92 | 0.97 | 0.92 | 0.96 | 0.06 |
| chr3_37121692_37127629_37127681_37129062 | LRRFIP2 | ND | 0 | 0.01 | 0 | 0.01 | 0 | 0.93 | 0.94 | 0 | 0.99 | ND |
| chr3_52679727_52681703_52681821_52682091 | PBRM1 | ND | ND | ND | ND | 0.11 | ND | 0.78 | 0.83 | ND | 0.94 | ND |
| chr3_62499269_62513637_62513707_62516058 | CADPS | 0.92 | 0.87 | 0.74 | 0.43 | 0.61 | 0.23 | 0.92 | 0.97 | ND | ND | 0.09 |
| chr4_101026062_101029165_101029196_101032266 | PPP3CA | 0.73 | 0.83 | 0.45 | 0.59 | 0.07 | 0.04 | 0.19 | 0.49 | 0.01 | 0.86 | 0.16 |
| chr4_113330471_113331971_113332071_113333053 | ANK2 | 0.34 | 0.18 | 0.06 | 0.13 | 0.02 | 0.03 | 0 | 0 | ND | 0 | 0.82 |
| chr4_113373450_113378089_113378182_113381456 | ANK2 | 0 | 0 | 0 | 0 | 0.01 | 0.01 | 0.45 | 0.49 | ND | 0.84 | ND |
| chr4_113500512_113502935_113502978_113509637 | CAMK2D | 0.5 | 0.34 | 0.24 | 0.36 | 0.5 | 0.22 | 0.46 | 0.64 | 0.01 | 0.96 | 0.54 |
| chr4_1802026_1802913_1803065_1803691 | FGFR3 | 0.01 | 0.02 | 0.03 | 0.02 | 0.93 | 0.94 | 0.15 | 0.08 | 0.86 | 0.97 | ND |
| chr4_185514338_185514702_185514891_185523361 | PDLIM3 | 0.79 | 0.82 | 0.84 | 0.85 | 0.98 | 0.97 | 0.74 | 0.57 | 0.87 | 0.01 | ND |
| chr4_42556041_42569160_42569206_42574618 | ATP8A1 | 0.78 | 0.43 | 0.18 | 0.19 | 0.07 | 0.02 | 0.53 | 0.83 | ND | 0.92 | 0.54 |
| chr4_8009103_8019617_8019672_8029655 | ABLIM2 | 0.77 | 0.69 | 0.5 | 0.66 | 0.13 | 0.06 | 0.3 | 0.44 | ND | 0.95 | 0.21 |
| chr4_82829059_82830936_82830976_82842139 | SEC31A | 0.05 | 0.05 | 0.04 | 0.05 | 0.19 | 0.48 | 0.1 | 0.09 | 0.94 | 0.18 | 0.09 |
| chr5_103187377_103189166_103189227_103190841 | PPIP5K2 | 0.38 | 0.1 | 0.03 | 0.16 | 0 | 0 | 0.04 | 0.03 | 0 | 0.97 | 0.07 |
| chr5_88823928_88882954_88883000_88887501 | MEF2C | 0.89 | 1 | 0.93 | 0.92 | 0.96 | 0.96 | 0.97 | 0.98 | ND | 0.1 | ND |
| chr6_138433681_138441982_138442115_138447000 | NHSL1 | 0.03 | 0.06 | ND | 0.16 | 0.96 | 0.94 | 0.05 | 0.04 | 0.54 | ND | ND |
| chr6_160143650_160155974_160156075_160158515 | SLC22A1 | ND | ND | ND | ND | ND | ND | 1 | ND | 0.91 | 0.08 | ND |
| chr6_29608734_29609228_29609380_29610923 | GABBR1 | 0.96 | 0.94 | 0.9 | 0.93 | 0.1 | 0.07 | 0.25 | 0.21 | 0.03 | 0.05 | 0.72 |
| chr6_54160433_54160739_54160800_54169527 | MLIP | 0.02 | ND | 0.01 | ND | ND | 0.02 | 0.34 | 0.51 | 0 | 0.81 | 0.02 |
| chr6_56463765_56464684_56464757_56466077 | DST | 0.38 | 0.43 | 0.59 | 0.53 | 0.16 | 0.09 | 0.66 | 0.73 | 0.01 | 0.91 | 0.46 |
| chr6_75892691_75894813_75894841_75895230 | MYO6 | 0.01 | 0 | 0.02 | 0.01 | 0.97 | 0.98 | ND | ND | 0.98 | ND | ND |
| chr7_128849579_128849975_128850075_128850383 | FLNC | 0.44 | 0.36 | 0.38 | 0.34 | 0.98 | 0.97 | 0.25 | 0.22 | 0.94 | 0.02 | ND |
| chr7_44234677_44239588_44239664_44240706 | CAMK2B | 0.94 | 0.93 | 0.81 | 0.41 | ND | ND | 0.01 | 0.01 | ND | 0.8 | 0.83 |
| chr7_51184200_51187913_51187959_51190849 | COBL | 0.01 | 0 | 0 | 0 | 0.02 | 0.01 | 0.36 | 0.4 | 0.01 | 0.99 | ND |
| chr7_74743521_74744138_74744251_74744757 | GTF21 | 0.88 | 0.9 | 0.93 | 0.92 | 0.93 | 0.92 | 0.93 | 0.87 | 0.95 | 0.95 | 0.02 |
| chr7_81997251_82001658_82001716_82005422 | CACNA2D1 | 0 | ND | 0 | 0 | 0 | 0 | 0.29 | ND | ND | 0.9 | ND |
| chr8_11861480_11864375_11864484_11868000 | CTSB | 0.96 | 0.97 | 0.95 | 0.94 | 0.89 | 0.88 | 0.89 | 0.91 | 0.86 | 0.94 | 0.11 |
| chr8_22528578_22531301_22531329_22532224 | PPP3CC | 0 | 0 | 0.01 | 0.01 | 0 | 0 | 0.12 | 0.19 | 0 | 0.91 | 0.1 |
| chr9_105512937_105513598_105513632_105534495 | FSD1L | 0.06 | ND | 1 | 0.16 | ND | ND | ND | ND | ND | 1 | 0.07 |
| chrX_103962724_103964227_103964295_103964505 | TMSB15B | 1 | ND | ND | ND | 0.98 | 1 | ND | ND | ND | ND | 0.15 |
| chrX_15827373_15840496_15840592_15845378 | AP1S2 | 0.07 | 0.04 | 0.01 | 0.01 | 0 | 0 | 0.41 | 0.6 | 0 | 0.93 | ND |

**The columns for Table 5 are further described as follows:
Coordinates: chromosome and splice site coordinates of the alternatively-spliced exon (from hg38). The 4 coordinates indicate the upstream constitutive 5′ splice site, the 3′ splice site of the alternative exon, the 5′ splice site of the alternative exon, and the downstream constitutive 3′ splice site, but the values are all in ascending order regardless of transcribed strand.
Gene: gene name for the gene that contains the screened exon.
Exon length: length of the exon in number of total nucleotides.
Upstream intron sequence by SEQ ID NO: sequence of selected upstream intronic sequence.
Exon sequence by SEQ ID NO: native sequence of the screened alternative exon.
Native 5′ splice site by SEQ ID NO: native 5′ splice site of the alternative exon.
Native 5′ splice site score: score of the native 5′ splice site of the alternative exon.
Exon sequence (with internal ATGs removed and ATG at the end) by SEQ ID NO: native exon sequence with all internal ATGs mutated, and with an ATG at the end of the alternative exon.
Compensated 5′ splice site sequence by SEQ ID NO: a 5′ splice site that has been mutated to match the native splice site strength.
Compensated 5′ splice site sequence score: score of the compensated 5′ splice site.
Downstream intron sequence by SEQ ID NO: sequence of selected downstream intronic sequence.
Downstream intron sequence (with compensated 5′ splice site): sequence of selected downstream intronic sequence with the compensated 5′ splice site.
Kozak sequence by SEQ ID NO: sequence that surrounds the ATG start codon. The first 2 bases following the ATG are GT in the context of a GFP coding sequence.
Kozak sequence score: a score for the efficiency of the Kozak sequence.
5′ splice site sequence (~1 bit stronger) by SEQ ID NO: a 5′ splice site selected to be approximately 1 bit stronger than the native 5′ splice site.
5′ splice site score (~1 bit stronger): the score of this 5′ splice site.
5′ splice site sequence (~1 bit weaker) by SEQ ID NO: a 5′ splice site selected to be approximately 1 bit weaker than the native 5′ splice site.
5′ splice site score (~1 bit weaker): the score of this 5′ splice site.
Subsequent columns denote psi values of each alternative exon in various tissues of interest.

Applications of this High Throughput Screening Approach to Identification of Alternative Exon Cassettes that can be Regulated by T-Cell Activation

[0608] The ability to increase or decrease exon inclusion in response to T-cell activation provides utility for various therapeutic purposes, such as CAR-T therapy or other immunotherapies. A major challenge in the context of CAR-T for solid tumors is T-cell exhaustion, a state in which the engineered T-cells no longer exhibit sufficient potency to eliminate tumor cells expressing the neoantigen due to co-expression of multiple inhibitory receptors. It has been previously shown that transcription factors such as T-bet can repress the expression of these inhibitory receptors and can instead sustain the activity of T-cells during chronic infection (26) and also enhance antitumor activity and limit T-cell exhaustion in CAR-T cells (27). However, constitutive over-expression of T-bet may also lead to undesired or autoimmune-like responses (28,29), and thus the addition of T-bet must be regulated in a context-dependent manner. Thus, an exon that is activated by T-cell activation might be engineered to control translation of T-bet or other cargoes that can modulate the state of the T-cell, thereby preventing or limiting T-cell exhaustion.

[0609] Publicly available transcriptome datasets in which T-cells were transcriptionally profiled before and after activation (30) were mined, and a set of 98 alternative exon cassettes were chosen (Table 6) to test for splicing behavior within the context of a lentivirus that can integrate into the T-cell genome. Two intronic regions, along with splice site-proximal exon fragments, were selected and fused together to form a new exon cassette. These alternative exon cassettes will be packaged into a lentivirus capsid and will be used to transduce naïve T-cells (31); T-cells will then be activated, RNA will be harvested, and deep sequencing libraries will be prepared and sequenced to identify alternative exon cassettes that show changes in splicing patterns upon activation.

TABLE 6
Table of T-cell activation-responsive exons.

| | | | Sequence 1 | | Sequence 2 |
|---|---|---|---|---|---|
| | | | (by SEQ | | (by SEQ |
| Gene | Strand | Coordinate 1 | ID NO) | Coordinate 2 | ID NO) |
| TNFAIP8 | + | chr5: 118691618-118691740 | 1884 | chr5: 118691793-118691916 | 1982 |
| HRAS | − | chr11: 533177-533299 | 1885 | chr11: 533335-533458 | 1983 |
| NPRL3 | − | chr16: 136567-136689 | 1886 | chr16: 136846-136969 | 1984 |
| NHP2L1 | − | chr22: 42083626-42083748 | 1887 | chr22: 42084308-42084431 | 1985 |
| NHP2L1 | − | chr22: 42078260-42078382 | 1888 | chr22: 42078568-42078691 | 1986 |
| RBM12 | − | chr20: 34246752-34246874 | 1889 | chr20: 34246913-34247036 | 1987 |
| RBM12 | − | chr20: 34243024-34243146 | 1890 | chr20: 34243243-34243366 | 1988 |
| RPL17 | − | chr18: 47017802-47017924 | 1891 | chr18: 47018180-47018303 | 1989 |
| BC021234, | + | chr22: 46746088-46746210 | 1892 | chr22: 46746337-46746460 | 1990 |
| BC069212 | | | | | |
| LUC7L | − | chr16: 278232-278354 | 1893 | chr16: 278378-278501 | 1991 |
| LUC7L | − | chr16: 277141-277263 | 1894 | chr16: 277312-277435 | 1992 |
| RPL22L1 | − | chr3: 170585702-170585824 | 1895 | chr3: 170585900-170586023 | 1993 |
| ABI1 | − | chr10: 27059904-27060011 | 1896 | chr10: 27060012-27060118 | 1994 |
| NUCB2 | + | chr11: 17308081-17308203 | 1897 | chr11: 17308241-17308364 | 1995 |
| NUCB2 | + | chr11: 17312687-17312809 | 1898 | chr11: 17312889-17313012 | 1996 |
| TM2D2 | − | chr8: 38852737-38852859 | 1899 | chr8: 38853290-38853413 | 1997 |
| OGDH | + | chr7: 44686943-44687065 | 1900 | chr7: 44687110-44687233 | 1998 |
| OGDH | + | chr7: 44687156-44687278 | 1901 | chr7: 44687335-44687458 | 1999 |
| TUBA1A | − | chr12: 49579993-49580115 | 1902 | chr12: 49580218-49580341 | 2000 |
| CDC42 | + | chr1: 22405099-22405221 | 1903 | chr1: 22405351-22405474 | 2001 |
| UBA52 | + | chr19: 18682514-18682636 | 1904 | chr19: 18682696-18682819 | 2002 |
| ANKS6 | − | chr9: 101498184-101498306 | 1905 | chr9: 101498882-101499005 | 2003 |
| STAG3L3, | − | chr7: 72470781-72470903 | 1906 | chr7: 72470981-72471104 | 2004 |
| BC073780 | | | | | |
| SRSF6 | + | chr20: 42087693-42087815 | 1907 | chr20: 42088037-42088160 | 2005 |
| USP15 | + | chr12: 62768071-62768193 | 1908 | chr12: 62768293-62768416 | 2006 |
| ARAP1 | − | chr11: 72403698-72403814 | 1909 | chr11: 72403815-72403930 | 2007 |
| RFC5 | + | chr12: 118455395-118455517 | 1910 | chr12: 118455597-118455720 | 2008 |
| C22orf29 | − | chr22: 19833569-19833691 | 1911 | chr22: 19839986-19840109 | 2009 |
| LUC7L | − | chr16: 258500-258622 | 1912 | chr16: 258640-258763 | 2010 |
| KIAA1704 | + | chr13: 45603274-45603396 | 1913 | chr13: 45606219-45606342 | 2011 |
| ARHGAP17 | − | chr16: 24950585-24950707 | 1914 | chr16: 24950895-24951018 | 2012 |
| TRA2A | − | chr7: 23561226-23561348 | 1915 | chr7: 23562028-23562151 | 2013 |
| PDXK | + | chr21: 45175258-45175380 | 1916 | chr21: 45175622-45175745 | 2014 |
| TRA2A | − | chr7: 23561640-23561762 | 1917 | chr7: 23562028-23562151 | 2015 |
| RPL13A | + | chr19: 49993007-49993129 | 1918 | chr19: 49993324-49993447 | 2016 |
| ALDOA | + | chr16: 30077097-30077219 | 1919 | chr16: 30077225-30077348 | 2017 |
| IRF3, | − | chr19: 50167600-50167722 | 1920 | chr19: 50167907-50168030 | 2018 |
| BC013599 | − | chr16: 3182751-3182873 | 1921 | chr16: 3183172-3183295 | 2019 |
| HRAS | − | chr11: 532142-532264 | 1922 | chr11: 532732-532855 | 2020 |
| FAM192A | − | chr16: 57212314-57212436 | 1923 | chr16: 57212741-57212864 | 2021 |
| SNRNP70 | + | chr19: 49605271-49605393 | 1924 | chr19: 49606821-49606944 | 2022 |
| SRSF2 | − | chr17: 74731754-74731876 | 1925 | chr17: 74731934-74732057 | 2023 |
| RPS24 | + | chr10: 79799862-79799984 | 1926 | chr10: 79799985-79800083 | 2024 |
| TRA2A | − | chr7: 23561651-23561773 | 1927 | chr7: 23562028-23562151 | 2025 |
| EIF4H | + | chr7: 73604477-73604599 | 1928 | chr7: 73604613-73604736 | 2026 |
| SIGIRR | − | chr11: 406743-406865 | 1929 | chr11: 406970-407093 | 2027 |
| CPSF7 | − | chr11: 61187842-61187964 | 1930 | chr11: 61189057-61189180 | 2028 |
| HMGN1 | − | chr21: 40719205-40719327 | 1931 | chr21: 40719386-40719509 | 2029 |
| HMGN1 | − | chr21: 40717656-40717778 | 1932 | chr21: 40717861-40717984 | 2030 |
| CENPV | − | chr17: 16251830-16251952 | 1933 | chr17: 16252624-16252747 | 2031 |
| HMGN1 | − | chr21: 40719205-40719327 | 1934 | chr21: 40719381-40719504 | 2032 |
| HMGN1 | − | chr21: 40717656-40717778 | 1935 | chr21: 40719195-40719318 | 2033 |
| SRRT, | + | chr7: 100480286-100480408 | 1936 | chr7: 100480688-100480811 | 2034 |
| NDUFV1 | + | chr11: 67375771-67375893 | 1937 | chr11: 67376170-67376293 | 2035 |
| NAA25 | − | chr12: 112487187-112487309 | 1938 | chr12: 112487392-112487515 | 2036 |
| SBDSP1 | + | chr7: 72301172-72301294 | 1939 | chr7: 72301370-72301493 | 2037 |
| NUMB | − | chr14: 73745889-73746011 | 1940 | chr14: 73746109-73746232 | 2038 |
| MFSD12 | − | chr19: 3542674-3542796 | 1941 | chr19: 3542952-3543075 | 2039 |
| GIT2 | − | chr12: 110384961-110385083 | 1942 | chr12: 110386628-110386751 | 2040 |
| NDUFV1 | + | chr11: 67374329-67374451 | 1943 | chr11: 67374772-67374895 | 2041 |
| FAM136A | − | chr2: 70527872-70527994 | 1944 | chr2: 70528712-70528835 | 2042 |
| EIF4A2, | + | chr3: 186505999-186506121 | 1945 | chr3: 186506186-186506309 | 2043 |
| LETMD1 | + | chr12: 51445775-51445897 | 1946 | chr12: 51446006-51446129 | 2044 |
| RPL13 | + | chr16: 89627248-89627370 | 1947 | chr16: 89627448-89627571 | 2045 |
| RPL13 | + | chr16: 89627535-89627657 | 1948 | chr16: 89627714-89627837 | 2046 |
| DHFR | − | chr5: 79933602-79933724 | 1949 | chr5: 79933805-79933928 | 2047 |
| DHFR | − | chr5: 79929596-79929718 | 1950 | chr5: 79929788-79929911 | 2048 |
| RPL17 | − | chr18: 47017622-47017744 | 1951 | chr18: 47017792-47017915 | 2049 |
| ATXN1 | − | chr6: 16326525-16326647 | 1952 | chr6: 16328678-16328801 | 2050 |
| CHTOP | + | chr1: 153614619-153614741 | 1953 | chr1: 153614882-153615005 | 2051 |
| NHP2L1 | − | chr22: 42083983-42084105 | 1954 | chr22: 42084308-42084431 | 2052 |
| NHP2L1 | − | chr22: 42078260-42078382 | 1955 | chr22: 42078568-42078691 | 2053 |
| TSEN15 | + | chr1: 184041191-184041304 | 1956 | chr1: 184041305-184041428 | 2054 |
| ATG12 | − | chr5: 115176094-115176216 | 1957 | chr5: 115176286-115176409 | 2055 |
| FAM49B | − | chr8: 130915458-130915572 | 1958 | chr8: 130915573-130915696 | 2056 |
| FAM49B | − | chr8: 130883521-130883643 | 1959 | chr8: 130883719-130883842 | 2057 |
| SRSF7 | − | chr2: 38975940-38976062 | 1960 | chr2: 38976292-38976415 | 2058 |
| FAM107B | − | chr10: 14595221-14595343 | 1961 | chr10: 14595363-14595486 | 2059 |
| PCMTD1 | − | chr8: 52751907-52752029 | 1962 | chr8: 52752175-52752298 | 2060 |
| BC013599 | − | chr16: 3182751-3182873 | 1963 | chr16: 3182923-3183046 | 2061 |
| n/a | − | chr2: 220082292-220082414 | 1964 | chr2: 220082506-220082629 | 2062 |
| USP1 | + | chr1: 62901875-62901997 | 1965 | chr1: 62902210-62902333 | 2063 |
| ANO8 | − | chr19: 17438871-17438993 | 1966 | chr19: 17440327-17440450 | 2064 |
| WDR61 | − | chr15: 78577503-78577625 | 1967 | chr15: 78578043-78578166 | 2065 |
| SLC25A3 | + | chr12: 98989111-98989233 | 1968 | chr12: 98989416-98989539 | 2066 |
| PRKAR1B | − | chr7: 767127-767249 | 1969 | chr7: 767290-767413 | 2067 |
| MIB2 | + | chr1: 1564314-1564436 | 1970 | chr1: 1564668-1564791 | 2068 |
| RIOK3 | + | chr18: 21053293-21053415 | 1971 | chr18: 21053567-21053690 | 2069 |
| LMNA | + | chr1: 156107345-156107467 | 1972 | chr1: 156108525-156108648 | 2070 |
| MALT1 | + | chr18: 56378053-56378169 | 1973 | chr18: 56378170-56378285 | 2071 |
| DNASE1 | + | chr16: 3706003-3706125 | 1974 | chr16: 3706163-3706286 | 2072 |
| MAP4K2 | − | chr11: 64568272-64568394 | 1975 | chr11: 64568480-64568603 | 2073 |
| CUGBP2 | + | chr10: 11308461-11308583 | 1976 | chr10: 11308617-11308740 | 2074 |
| MAP2K7 | + | chr10: 7970593-7970715 | 1977 | chr10: 7970717-7970840 | 2075 |
| PTPRC | + | chr1: 198671416-198671538 | 1978 | chr1: 198671636-198671759 | 2076 |
| ZNF496 | + | chr1: 247485900-247486022 | 1979 | chr1: 247486084-247486207 | 2077 |
| FAM136A | − | chr2: 70528554-70528676 | 1980 | chr2: 70528712-70528835 | 2078 |
| COX20 | + | chr1: 245005146-245005268 | 1981 | chr1: 245005337-245005460 | 2079 |

**The columns for Table 6 are further described as follows:
Gene name: name of the gene.
Strand: transcribed strand for this gene.
Coordinate 1: the coordinates of the upstream intron and 5′ end of the exon, including the 3′ splice site (hg19 coordinates).
Sequence 1 (by SEQ ID NO): the sequence corresponding to coordinate 1.
Coordinate 2: the coordinates of the 3′ end of the exon, including the 5′ splice site, and downstream intron (hg19 coordinates).
Sequence 2 (by SEQ ID NO): the sequence corresponding to coordinate 2.

### References of Example 5

[0610] 1. Wang, E. T. et al. Alternative isoform regulation in human tissue transcriptomes. Nature 456, 470-476 (2008).
[0611] 2. Gerstberger, S., Hafner, M., Ascano, M. & Tuschl, T. Evolutionary Conservation and Expression of Human RNA-Binding Proteins and Their Role in Human Genetic Disease. Adv. Exp. Med. Biol. 825, 1-55 (2014).
[0612] 3. Cooper, T. A. Use of minigene systems to dissect alternative splicing elements. Methods 37, 331-340 (2005).
[0613] 4. Coulter, L. R., Landree, M. A. & Cooper, T. A. Identification of a new class of exonic splicing enhancers by in vivo selection. Mol. Cell. Biol. 17, 2143-2150 (1997).
[0614] 5. Lorson, C. L., Hahnen, E., Androphy, E. J. & Wirth, B. A single nucleotide in the SMN gene regulates splicing and is responsible for spinal muscular atrophy. Proc. Natl. Acad. Sci. 96, 6307-6311 (1999).
[0615] 6. Wong, M. S., Kinney, J. B. & Krainer, A. R. Quantitative Activity Profile and Context Dependence of All Human 5′ Splice Sites. Mol. Cell 71, 1012-1026.e3 (2018).
[0616] 7. Orengo, J. P., Bundman, D. & Cooper, T. A. A bichromatic fluorescent reporter for cell-based screens of alternative splicing. Nucleic Acids Res. 34, e148 (2006).
[0617] 8. Boyne, A. R., et al. International Patent App. No. PCT/US2016/016234, entitled “Regulation of gene expression by aptamer-mediated modulation of alternative splicing”, filed Feb. 2, 2016 and published as International Pub. No. WO2016126747A1.
[0618] 9. Monteys, A. M. et al. Regulated control of gene therapies by drug-induced splicing. Nature 596, 291-295 (2021).
[0619] 10. Freyermuth, F. et al. Splicing misregulation of SCNSA contributes to cardiac-conduction delay and heart arrhythmia in myotonic dystrophy. Nat. Commun. 7, 11067 (2016).
[0620] 11. Cheung, R. et al. A Multiplexed Assay for Exon Recognition Reveals that an Unappreciated Fraction of Rare Genetic Variants Cause Large-Effect Splicing Disruptions. Mol. Cell 73, 183-194.e8 (2019).
[0621] 12. Lawlor, M. W. & Dowling, J. J. X-linked myotubular myopathy. Neuromuscul. Disord. 31, 1004-1012 (2021).
[0622] 13. Childers, M. K. et al. Gene Therapy Prolongs Survival and Restores Function in Murine and Canine Models of Myotubular Myopathy. Sci. Transl. Med. 6, 220ra10 (2014).
[0623] 14. Yeo, G. & Burge, C. B. Maximum entropy modeling of short sequence motifs with applications to RNA splicing signals. J. Comput. Biol. J. Comput. Mol. Cell Biol. 11, 377-394 (2004).
[0624] 15. Noderer, W. L. et al. Quantitative analysis of mammalian translation initiation sites by FACS-seq. Mol. Syst. Biol. 10, 748 (2014).
[0625] 16. Adamson, S. I., Zhan, L. & Graveley, B. R. Vex-seq: high-throughput identification of the impact of genetic variation on pre-mRNA splicing efficiency. Genome Biol. 19, 71 (2018).
[0626] 17. Carithers, L. J. et al. A Novel Approach to High-Quality Postmortem Tissue Procurement: The GTEx Project. Biopreservation Biobanking 13, 311-319 (2015).
[0627] 18. Cook, K. B., Kazan, H., Zuberi, K., Morris, Q. & Hughes, T. R. RBPDB: a database of RNA-binding specificities. Nucleic Acids Res. 39, D301-D308 (2011).
[0628] 19. Fugier, C. et al. Misregulated alternative splicing of BIN1 is associated with T tubule alterations and muscle weakness in myotonic dystrophy. Nat. Med. 17, 720-725 (2011).
[0629] 20. Singh, R. K., Kolonin, A. M., Fiorotto, M. L. & Cooper, T. A. Rbfox-Splicing Factors Maintain Skeletal Muscle Mass by Regulating Calpain3 and Proteostasis. Cell Rep. 24, 197-208 (2018).
[0630] 21. Farazi, T. A. et al. Identification of the RNA recognition element of the RBPMS family of RNA-binding proteins and their transcriptome-wide mRNA targets. RNA 20, 1090-1102 (2014).
[0631] 22. Nakagaki-Silva, E. E. et al. Identification of RBPMS as a mammalian smooth muscle master splicing regulator via proximity of its gene with super-enhancers. eLife 8, e46327 (2019).
[0632] 23. Naqvi, S. et al. Conservation, acquisition, and functional impact of sex-biased gene expression in mammals. Science (2019) doi:10.1126/science.aaw7317.
[0633] 24. Tabebordbar, M. et al. Directed evolution of a family of AAV capsid variants enabling potent muscle-directed gene delivery across species. Cell 184, 4919-4938.e22 (2021).
[0634] 25. Chan, K. Y. et al. Engineered AAVs for efficient noninvasive gene delivery to the central and peripheral nervous systems. Nat. Neurosci. 20, 1172-1179 (2017).
[0635] 26. Kao, C. et al. Transcription factor T-bet represses expression of the inhibitory receptor PD-1 and sustains virus-specific CD8+ T cell responses during chronic infection. Nat. Immunol. 12, 663-671 (2011).
[0636] 27. Gacerez, A. T. & Sentman, C. L. T-bet promotes potent antitumor activity of CD4+ CAR T cells. Cancer Gene Ther. 25, 117-128 (2018).
[0637] 28. Austin, J. W. et al. Overexpression of T-bet in HIV infection is associated with accumulation of B cells outside germinal centers and poor affinity maturation. Sci. Transl. Med. (2019) doi:10.1126/scitranslmed.aax0904.
[0638] 29. Shimohata, H. et al. Overexpression of T-bet in T cells accelerates autoimmune glomerulonephritis in mice with a dominant Th1 background. J. Nephrol. 22, 123-129 (2009).
[0639] 30. Martinez, N. M. et al. Alternative splicing networks regulated by signaling in human T cells. RNA 18(5), 1029-1040 (2012).
[0640] 31. Bernadin, O. et al. Baboon envelope LVs efficiently transduced human adult, fetal, and progenitor T cells and corrected SCID-X1 T-cell deficiency. Blood Adv. 3, 461-475 (2019).

### OTHER EMBODIMENTS

[0641] All of the features disclosed in this specification may be combined in any combination. Each feature disclosed in this specification may be replaced by an alternative feature serving the same, equivalent, or similar purpose. Thus, unless expressly stated otherwise, each feature disclosed is only an example of a generic series of equivalent or similar features. From the above description, one skilled in the art can easily ascertain the essential characteristics of the present disclosure, and without departing from the spirit and scope thereof, can make various changes and modifications of the present disclosure to adapt it to various usages and conditions. Thus, other embodiments are also within the claims.

### EQUIVALENTS

[0642] While several inventive embodiments have been described and illustrated herein, those of ordinary skill in the art will readily envision a variety of other means and/or structures for performing the function and/or obtaining the results and/or one or more of the advantages described herein, and each of such variations and/or modifications is deemed to be within the scope of the inventive embodiments described herein. More generally, those skilled in the art will readily appreciate that all parameters, dimensions, materials, and configurations described herein are meant to be exemplary and that the actual parameters, dimensions, materials, and/or configurations will depend upon the specific application or applications for which the inventive teachings is/are used. Those skilled in the art will recognize, or be able to ascertain using no more than routine experimentation, many equivalents to the specific inventive embodiments described herein. It is, therefore, to be understood that the foregoing embodiments are presented by way of example only and that, within the scope of the appended claims and equivalents thereto, inventive embodiments may be practiced otherwise than as specifically described and claimed. Inventive embodiments of the present disclosure are directed to each individual feature, system, article, material, kit, and/or method described herein. In addition, any combination of two or more such features, systems, articles, materials, kits, and/or methods, if such features, systems, articles, materials, kits, and/or methods are not mutually inconsistent, is included within the inventive scope of the present disclosure.

[0643] All definitions, as defined and used herein, should be understood to control over dictionary definitions, definitions in documents incorporated by reference, and/or ordinary meanings of the defined terms.

[0644] All references, patents and patent applications disclosed herein are incorporated by reference with respect to the subject matter for which each is cited, which in some cases may encompass the entirety of the document.

[0645] The indefinite articles “a” and “an,” as used herein in the specification and in the claims, unless clearly indicated to the contrary, should be understood to mean “at least one.”

[0646] The phrase “and/or,” as used herein in the specification and in the claims, should be understood to mean “either or both” of the elements so conjoined, i.e., elements that are conjunctively present in some cases and disjunctively present in other cases. Multiple elements listed with “and/or” should be construed in the same fashion, i.e., “one or more” of the elements so conjoined. Other elements may optionally be present other than the elements specifically identified by the “and/or” clause, whether related or unrelated to those elements specifically identified. Thus, as a non-limiting example, a reference to “A and/or B”, when used in conjunction with open-ended language such as “comprising” can refer, in one embodiment, to A only (optionally including elements other than B); in another embodiment, to B only (optionally including elements other than A); in yet another embodiment, to both A and B (optionally including other elements); etc.

[0647] As used herein in the specification and in the claims, “or” should be understood to have the same meaning as “and/or” as defined above. For example, when separating items in a list, “or” or “and/or” shall be interpreted as being inclusive, i.e., the inclusion of at least one, but also including more than one, of a number or list of elements, and, optionally, additional unlisted items. Only terms clearly indicated to the contrary, such as “only one of” or “exactly one of,” or, when used in the claims, “consisting of,” will refer to the inclusion of exactly one element of a number or list of elements. In general, the term “or” as used herein shall only be interpreted as indicating exclusive alternatives (i.e. “one or the other but not both”) when preceded by terms of exclusivity, such as “either,” “one of,” “only one of,” or “exactly one of.” “Consisting essentially of,” when used in the claims, shall have its ordinary meaning as used in the field of patent law.

[0648] As used herein in the specification and in the claims, the phrase “at least one,” in reference to a list of one or more elements, should be understood to mean at least one element selected from any one or more of the elements in the list of elements, but not necessarily including at least one of each and every element specifically listed within the list of elements and not excluding any combinations of elements in the list of elements. This definition also allows that elements may optionally be present other than the elements specifically identified within the list of elements to which the phrase “at least one” refers, whether related or unrelated to those elements specifically identified. Thus, as a non-limiting example, “at least one of A and B” (or, equivalently, “at least one of A or B,” or, equivalently “at least one of A and/or B”) can refer, in one embodiment, to at least one, optionally including more than one, A, with no B present (and optionally including elements other than B); in another embodiment, to at least one, optionally including more than one, B, with no A present (and optionally including elements other than A); in yet another embodiment, to at least one, optionally including more than one, A, and at least one, optionally including more than one, B (and optionally including other elements); etc.

[0649] It should also be understood that, unless clearly indicated to the contrary, in any methods claimed herein that include more than one step or act, the order of the steps or acts of the method is not necessarily limited to the order in which the steps or acts of the method are recited.

[0650] In the claims, as well as in the specification above, all transitional phrases such as “comprising,” “including,” “carrying,” “having,” “containing,” “involving,” “holding,” “composed of,” and the like are to be understood to be open-ended, i.e., to mean including but not limited to. Only the transitional phrases “consisting of” and “consisting essentially of” shall be closed or semi-closed transitional phrases, respectively, as set forth in the United States Patent Office Manual of Patent Examining Procedures, Section 2111.03. It should be appreciated that embodiments described in this document using an open-ended transitional phrase (e.g., “comprising”) are also contemplated, in alternative embodiments, as “consisting of” and “consisting essentially of” the feature described by the open-ended transitional phrase. For example, if the disclosure describes “a composition comprising A and B”, the disclosure also contemplates the alternative embodiments “a composition consisting of A and B” and “a composition consisting essentially of A and B”.

What is claimed is:

1. A transgene comprising:
(i) a constitutive exon and one or more intronic sequences, each from a first gene;
(ii) an alternatively-spliced exon cassette, wherein the alternatively-spliced exon cassette comprises:
(a) an alternatively-spliced exon, and
(b) flanking intronic sequences,
wherein each of (a) and (b) are from a second gene; and
(iii) a coding region of interest from a third gene,
wherein the alternatively-spliced exon comprises an ATG start codon.

2. The transgene of claim 1, wherein the first and second gene are the same gene; the first and third gene are the same gene; or all of the first, second, and third genes are the same gene.

3. The transgene of claim 1, wherein the first gene is survival motor neuron 1 (SMN1).

4. The transgene of claim 1, wherein the constitutive exon comprises exon 6 of SMN1, or a portion thereof.

5. The transgene of claim 1, wherein the constitutive exon comprises a polynucleotide having at least 70%, at least 75%, at least 80%, at least 90%, at least 92%, at least 95%, at least 98%, or at least 99% sequence identity, relative to a nucleic acid sequence as set forth in SEQ ID NO: 102.

6. The transgene of claim 1, wherein the constitutive exon comprises a polynucleotide having a nucleic acid sequence as set forth in SEQ ID NO: 102.

7. The transgene of claim 1, wherein the one or more intronic sequences of (i) are or are derived from intron 6 and/or intron 7 of SMN1.

8. The transgene of claim 1, wherein the one or more intronic sequences of (i) comprise(s) a polynucleotide having at least 70%, at least 75%, at least 80%, at least 90%, at least 92%, at least 95%, at least 98%, or at least 99% sequence identity, relative to a nucleic acid sequence as set forth in SEQ ID NO: 103 and/or SEQ ID NO: 104.

9. The transgene of claim 1, wherein the one or more intronic sequences of (i) comprise(s) a polynucleotide having a nucleic acid sequence as set forth in SEQ ID NO: 103 and/or SEQ ID NO: 104.

10. The transgene of claim 1, wherein the second gene is a gene selected from the group consisting of: CAMK2B, PKP2, LGMN, NRAP, VPS39, KSR1, PDLIM3, BIN1, ARFGAP2, KIF13A, and/or PICALM.

11. The transgene of claim 1, wherein the second gene is bridging integrator 1 (BIN1).

12. The transgene of claim 1, wherein the alternatively-spliced exon comprises exon 11 of BIN1.

13. The transgene of claim 1, wherein the alternatively-spliced exon comprises a polynucleotide having at least 70%, at least 75%, at least 80%, at least 90%, at least 92%, at least 95%, at least 98%, or at least 99% sequence identity, relative to a nucleic acid sequence as set forth in either SEQ ID NO: 37 or SEQ ID NO: 38.

14. The transgene of claim 1, wherein the alternatively-spliced exon comprises a polynucleotide having a nucleic acid sequence as set forth in either SEQ ID NO: 37 or SEQ ID NO: 38.

15. The transgene of claim 1, wherein the flanking intronic sequences of (ii) are or are derived from intron 10 and/or intron 11 of BIN1.

16. The transgene of claim 1, wherein the flanking intronic sequences of (ii) each comprise a polynucleotide having at least 70%, at least 75%, at least 80%, at least 90%, at least 92%, at least 95%, at least 98%, or at least 99% sequence identity, relative to a nucleic acid sequence as set forth in either SEQ ID NO: 15 or SEQ ID NO: 16.

17. The transgene of claim 1, wherein the flanking intronic sequences of (ii) each comprise a polynucleotide having a nucleic acid sequence as set forth in either SEQ ID NO: 15 or SEQ ID NO: 16.

18. The transgene of claim 1, wherein the alternatively-spliced exon cassette comprises a polynucleotide having at least 70%, at least 75%, at least 80%, at least 90%, at least 92%, at least 95%, at least 98%, or at least 99% sequence identity, relative to a nucleic acid sequence as set forth in any one of SEQ ID NOs: 107-778.

19. The transgene of claim 1, wherein the alternatively-spliced exon cassette comprises a polynucleotide having a nucleic acid sequence as set forth in any one of SEQ ID NOs: 107-778.

20. The transgene of claim 1, wherein the third gene is myotubularin 1 (MTM1) or calpain 3 (CAPN3).

21. The transgene of claim 1, wherein the coding region of interest comprises a polynucleotide having at least 70%, at least 75%, at least 80%, at least 90%, at least 92%, at least 95%, at least 98%, or at least 99% sequence identity, relative to a nucleic acid sequence as set forth in either SEQ ID NO: 1881 or SEQ ID NO: 1882.

22. The transgene of claim 1, wherein the coding region of interest comprises a polynucleotide having a nucleic acid sequence as set forth in either SEQ ID NO: 1881 or SEQ ID NO: 1882.

23. The transgene of claim 1, wherein, if the wild-type alternatively-spliced exon does not comprise an ATG start codon, the alternatively-spliced exon comprises 1-3 nucleic acid substitutions, relative to the wild-type alternatively-spliced exon, to form the ATG start codon within the alternatively-spliced exon.

24. The transgene of claim 23, wherein the ATG start codon is formed in the alternatively-spliced exon by 1 nucleic acid substitution.

25. The transgene of claim 23, wherein the ATG start codon is formed in the alternatively-spliced exon by 2 nucleic acid substitutions.

26. The transgene of claim 23, wherein the ATG start codon is formed in the alternatively-spliced exon by 3 nucleic acid substitutions.

27. The transgene of claim 1, wherein the alternatively-spliced exon is retained in the spliced transcript.

28. The transgene of claim 1, wherein all native start codons located 5′ to the ATG start codon located within the alternatively-spliced exon are disrupted or deleted.

29. The transgene of claim 1, wherein the alternatively-spliced exon cassette is located 5′, relative to the coding region of interest.

30. The transgene of claim 1, wherein the constitutive exon is located 5′, relative to the alternatively-spliced exon cassette.

31. The transgene of claim 1, wherein the one or more intronic sequences of (i) flank the alternatively-spliced exon cassette.

32. The transgene of claim 1, wherein the alternatively-spliced exon comprises a heterologous, in-frame stop codon.

33. The transgene of claim 32, wherein the heterologous, in-frame stop codon is at least 50 nucleotides upstream of the next 5′ splice junction.

34. The transgene of claim 32, wherein the heterologous, in-frame stop codon elicits nonsense-mediated decay.

35. The transgene of claim 1, wherein the alternatively-spliced exon is retained in the spliced transcript in distinct tissues.

36. The transgene of claim 35, wherein the alternatively-spliced exon is retained in the spliced transcript in skeletal muscle, and/or wherein the alternatively-spliced exon is not retained in the spliced transcript in heart and/or liver tissue.

37. The transgene of claim 1, wherein the flanking intronic sequences of (ii)(b) are or are derived from native flanking introns of the alternatively-spliced exon.

38. The transgene of claim 1, wherein the flanking intronic sequences of (ii)(b) each comprise at least one modification, relative to a naturally occurring intronic sequence.

39. The transgene of claim 38, wherein the modification is a substitution or deletion of one or more nucleic acids.

40. The transgene of claim 1, wherein the ATG start codon is located at the 3′ end of the alternatively-spliced exon.

41. The transgene of claim 40, wherein, if the wild-type alternatively-spliced exon does not comprise an ATG start codon at its 3′ end, the first 10 nucleotides of the flanking intronic sequence which is immediately 3′ to the alternatively-spliced exon comprise 1-5 nucleotide substitutions, relative to the wild-type flanking intronic sequence which is immediately 3′ to the wild-type alternatively-spliced exon.

42. The transgene of claim 1, wherein the one or more intronic sequences of (i) each comprise at least one modification, relative to a naturally occurring intronic sequence.

43. The transgene of claim 42, wherein the modification is a substitution or deletion of one or more nucleic acids.

44. The transgene of claim 1, wherein the coding region of interest comprises at least one modification, relative to a naturally occurring coding region of the third gene.

45. The transgene of claim 44, wherein the modification is a substitution or deletion of one or more nucleic acids.

46. The transgene of claim 44, wherein the coding region of interest comprises a deletion or disruption of a native start codon.

47. The transgene of claim 44, wherein the coding region of interest comprises at least one heterologous stop codon.

48. The transgene of claim 47, wherein the at least one heterologous stop codon is at least 50 nucleotides upstream of the next 5′ splice junction.

49. The transgene of claim 47, wherein the at least one heterologous stop codon elicits nonsense-mediated decay.

50. The transgene of claim 1, further comprising a 3′ untranslated region (UTR).

51. The transgene of claim 50, wherein the 3′ UTR comprises a polyadenylation (pA) site and a cleavage site.

52. The transgene of claim 51, wherein the polyadenylation site is an SV40 pA site.

53. The transgene of claim 1, further comprising a promoter, wherein the promoter is located 5′, relative to all of (i), (ii), and (iii).

54. The transgene of claim 53, wherein the promoter is a tissue-specific promoter.

55. The transgene of claim 54, wherein the tissue-specific promoter is an MHCK7 promoter.

56. The transgene of claim 1, wherein the alternatively-spliced exon cassette comprises a nucleic acid sequence which is 450 to 650 nucleotides in length.

57. A recombinant viral genome comprising the transgene of claim 1.

58. The recombinant viral genome of claim 57, wherein the recombinant viral genome is a genome from a recombinant adeno-associated virus (rAAV).

59. The recombinant viral genome of claim 58, wherein the transgene is flanked by AAV inverted terminal repeat (ITR) sequences.

60. The recombinant viral genome of claim 59, wherein the AAV ITR sequences are AAV2 ITR sequences.

61. The recombinant viral genome of claim 57, wherein the recombinant viral genome comprises a polynucleotide having at least 70%, at least 75%, at least 80%, at least 90%, at least 92%, at least 95%, at least 98%, or at least 99% sequence identity, relative to a nucleic acid sequence as set forth in either SEQ ID NO: 105 or SEQ ID NO: 106.

62. The recombinant viral genome of claim 57, wherein the recombinant viral genome comprises a polynucleotide having a nucleic acid sequence as set forth in either SEQ ID NO: 105 or SEQ ID NO: 106.

63. An rAAV particle comprising a recombinant viral genome according to claim 57.

64. The rAAV particle of claim 63, wherein the rAAV particle comprises AAV serotype 1, 2, 3, 4, 5, 6, 7, 8, 9, or 10, or AAV derivative or pseudotype AAV2-AAV3 hybrid, AAVrh.10, AAVhu.14, AAV3a/3b, AAVrh32.33, AAV-HSC15, AAV-HSC17, AAVhu.37, AAVrh.8, CHt-P6, AAV2.5, AAV6.2, AAV2i8, AAV-HSC15/17, AAVM41, AAV9.45, AAV6(Y445F/Y731F), AAV2.5T, AAV-HAE1/2, AAV clone 32/83, AAV5hH10, AAV2 (Y→F), AAV8 (Y733F), AAV2.15, AAV2.4, AAVM41, and AAVr3.45.

65. The rAAV particle of claim 63, further comprising at least one helper plasmid.

66. The rAAV particle of claim 65, wherein the helper plasmid comprises a rep gene and a cap gene.

67. The rAAV particle of claim 66, wherein the rep gene encodes Rep78, Rep68, Rep52, or Rep40, and/or wherein the cap gene encodes a VP1, VP2, and/or VP3 region of the viral capsid protein.

68. The rAAV particle of claim 65, wherein the rAAV particle comprises two helper plasmids.

69. The rAAV particle of claim 68, wherein the first helper plasmid comprises a rep gene and a cap gene and the second helper plasmid comprises a E1a gene, a E1b gene, a E4 gene, a E2a gene, and a VA gene.

70. A recombinant viral genome comprising a transgene, wherein the transgene comprises:
(i) a constitutive exon and one or more intronic sequences;
(ii) an alternative exon cassette comprising:
(a) an alternatively-spliced exon;
(b) at least a portion of the intron immediately upstream of the alternatively-spliced exon; and
(c) at least a portion of the intron immediately downstream of the alternatively-spliced exon,
wherein, if the wild-type alternatively-spliced exon does not comprise an ATG start codon at its 3′ end:
(1) the 3′ end of the alternatively-spliced exon comprises 1-3 nucleic acid substitutions relative to the wild-type alternatively-spliced exon to form an ATG start codon, and
(2) the first 10 nucleotides of the intron immediately downstream of the alternatively-spliced exon comprise 1-5 nucleic acid substitutions relative to the wild-type intron immediately downstream of the wild-type alternatively-spliced exon; and
(iii) a coding region of interest.

71. The recombinant viral genome of claim 70, wherein the 1-5 nucleic acid substitutions of (2) increase splice site strength.

72. The recombinant viral genome of claim 70, wherein any wild-type start codons within the alternatively-spliced exon located upstream of the ATG start codon at the 3′ end of the alternatively-spliced exon are disrupted or deleted.

73. The recombinant viral genome of claim 70, further comprising a tissue-specific promoter upstream of the alternative exon cassette.

74. The recombinant viral genome of claim 73, wherein the coding region of interest is or is derived from a naturally occurring coding region of MTM1 or CAPN3.

75. The recombinant viral genome of claim 74, wherein the tissue-specific promoter is an MHCK7 promoter.

76. The recombinant viral genome of claim 75, wherein the alternative exon is exon 11 of the BIN1 gene.

77. The recombinant viral genome of claim 76, wherein the constitutive exon is exon 6 of the SMN1 gene.

78. The recombinant viral genome of claim 77, wherein the alternative exon cassette promotes skeletal muscle expression of the coding region of interest and reduces cardiac muscle expression of the coding region of interest.

79. The recombinant viral genome of claim 78, wherein the alternative exon cassette is approximately 600 nucleotides in length.

80. A method of treating a disease or condition in a subject comprising administering a recombinant viral genome according to any one of claim 57-62 or 70-79, or an rAAV particle according to any one of claims 63-69, to the subject.

81. The method of claim 80, wherein the subject is a mammal.

82. The method of claim 81, wherein the mammal is a human.

83. The method of any one of claims 80-82, wherein the recombinant viral genome or rAAV particle is administered to the subject at least one time.

84. The method of claim 83, wherein the viral genome or rAAV particle is administered to the subject 2, 3, 4, 5, 6, 7, 8, 9, or 10 times.

85. The method of any one of claims 80-84, wherein the viral genome or rAAV particle is administered to the subject parenterally, subcutaneously, intraocularly, intravitreally, subretinally, intravenously (IV), intracerebro-ventricularly, intramuscularly, intrathecally (IT), intracisternally, intraperitoneally, enterally, via inhalation, topically, or by direct injection to one or more cells, tissues, or organs.

86. The method of any one of claims 80-85, wherein the viral genome or viral particle is administered to the subject by intravenous injection, intramuscular injection, intrathecal injection, or intravitreal injection.

87. The method of any one of claims 80-86, wherein the disease or condition is a disease or condition selected from the group consisting of Dentatorubral-pallido-luysian atrophy (DRPLA), myotonic dystrophy type 1 (DM1), myotonic dystrophy type 2 (DM2), Fragile X syndrome of mental retardation (FMR1), Fragile X tremor ataxia syndrome (FXTAS), FRAXE mental retardation (FMR2), Friedreichs ataxia (FRDA), Huntington disease (HD), Huntington disease-like 2 (HDL2), Oculopharyngeal muscular dystrophy (OPMD), Myoclonic epilepsy type 1, Alzheimer's disease, ALS/FTD, spinocerebellar ataxia type 1 (SCA1), spinocerebellar ataxia type 2 (SCA2), spinocerebellar ataxia type 3 (SCA3), spinocerebellar ataxia type 6 (SCA6), spinocerebellar ataxia type 7 (SCAT), spinocerebellar ataxia type 8 (SCA8), spinocerebellar ataxia type 10 (SCA10), spinocerebellar ataxia type 12 (SCA12), spinocerebellar ataxia type 17 (SCA17), Syndromic/non-syndromic X-linked mental retardation, Emery-Dreifuss muscular dystrophy type 2, familial partial lipodystrophy, limb girdle muscular dystrophy type 1B, dilated cardiomyopathy, familial partial lipodystrophy, Charcot-Marie-Tooth disorder type 2B1, mandibuloacral dysplasia, childhood progeria syndrome (Hutchinson-Gilford syndrome), Werner syndrome, Dilated cardiomyopathy (DCM), Hypertrophic cardiomyopathy (HCM), Restrictive cardiomyopathy (RCM), Left Ventricular Non-compaction (LVNC), Arrhythmogenic Right Ventricular Dysplasia (ARVD), takotsubo cardiomyopathy, Duchenne muscular dystrophy, Becker muscular dystrophy, Limb-girdle muscular dystrophy, Facioscapulohumeral muscular dystrophy, Congenital muscular dystrophy, Oculopharyngeal muscular dystrophy, Distal muscular dystrophy, Emery-Dreifuss muscular dystrophy, dementia, Parkinson's disease (PD), a PD-related disorder, Prion disease, a motor neuron disease (MND), Progressive bulbar palsy (PBP), Progressive muscular atrophy (PMA), Primary lateral sclerosis (PLS), Spinal muscular atrophy (SMA), a bladder cancer, a breast cancer, a colorectal cancer, a kidney cancer, a lung cancer, a lymphoma, a melanoma, an oral cancer, an ovarian cancer, an oropharyngeal cancer, a pancreatic cancer, a prostate cancer, a thyroid cancer, a uterine cancer, Down syndrome, Prader-Willi Syndrome (PWS), Bloom Syndrome, Cockayne Syndrome Type I-216400, Cockayne Syndrome Type III, Cockayne Syndrome Type I, Hutchinson-Gilford Progeria Syndrome, Mandibuloacral Dysplasia with Type A Lipodystrophy, Progeria, Adult Onset Progeroid Syndrome, Neonatal Rothmund-Thomson Syndrome, Seip Syndrome, Werner Syndrome, Replication Focus-Forming Activity 1, myotubular myopathy, Danon Disease, and/or centronuclear myopathy.

88. The transgene of claim 1, wherein the ATG start codon is in the same reading frame as the coding region of interest.

89. The transgene of claim 1, wherein the ATG start codon is within up to 5, 10, 20, or 30 nucleotides upstream of the 3′ end of the alternative-spliced exon.

90. The transgene of claim 1, wherein the ATG start codon is within up to 5, 10, 20, or 30 nucleotides upstream of the 3′ end of the alternative-spliced exon and is in the same reading frame as the coding region of interest.

The application's sequence listing, which the Patent Office published only in electronic form, follows.

SEQUENCE LISTING (2079 sequences)

SEQ ID NO: 1 - DNA, 343 bp, Artificial Sequence
  Synthetic
ctgttacttttgctgtgatgctgtaatgccgggaacgcgtgcacacggtcacaccaacactaataggactgtcctgtctgctgtgtgctcaccacaccctttgggcatgagaagcccccactggggttttctaaggagaaaggaggcaaatgcttttccgtgtcaatcagtccaatcttgttttcactctcttgagcaaaggattctggaaccatctgtcacctaaactttaactctaatcttcttctgcttcctttgtctcttttcttcccttacctcgcccacccctcgtctgtgtccgcccacccctcccttcccctcgtctctaacccggtgctaacag

SEQ ID NO: 2 - DNA, 82 bp, Artificial Sequence
  Synthetic
gtaggtgtgtctcgaccagcgtcccgcccgctcccgcccgtccctcctgccagcatgcagccccctgctgcacgcagccgct

SEQ ID NO: 3 - DNA, 326 bp, Artificial Sequence
  Synthetic
ggaaaattccactccctttgttccaattaatcctctctggtttttattgtaaggtgtactttttctttgagtgtcctgtgtggtcctttttaaaaggaggaaatgtcattatgcttcacattcttaagcttctggcaggcagagactattaatttgtttgcttatttaggactaaagaagcttttgttttttttcttcatttctctcttctttctaacttgcttttgtagcttagtaaccaaaactcagcctcagacttgtctttaaattgttttcaaccaccttctgtgccctgagtacctatgcttcctctttcctttgtacag

SEQ ID NO: 4 - DNA, 42 bp, Artificial Sequence
  Synthetic
gtgagacccctgtctctactcaaaatacaaaaaaattagccg

SEQ ID NO: 5 - DNA, 182 bp, Artificial Sequence
  Synthetic
cctggatgtgaacttgactctgctacttagatggccctgtgaacttgaccttattacttgcattgttggtgataatttatctggaatgggcactgcatcccaaacttctcaaatggattaaacctgacttgatggtacatttcttggatccaagtgaagtcttttttttcttttcttgacag

SEQ ID NO: 6 - DNA, 194 bp, Artificial Sequence
  Synthetic
gtatgtgccaccatacttggctaatttttgtatttttagtagagatggggtttcaccatgttggccaggctggtctcgaactcctggcgtcaagtgatcaacccgtctcggcctcccaaaatgctgggattacaggcatgagccactgcacccggccccaagtgaagtcttttaagtgaattactgacctggta

SEQ ID NO: 7 - DNA, 279 bp, Artificial Sequence
  Synthetic
accagttttgccattttttgagttatgaaatcttatattatttgttcttgaaagcgactatatgcttttaattttctgaatgaaaccaattatttgctatttattatgattcatttttataaaggaaaatatgtcctgctaacttagcatattctatgcttgatatgttaaaatcttgggttgaaagttttctaaaaatatcctagtcaagtcctgggacattttcaagagtgacttcggatttggttctattgtgtgtctggtgttttgatttccaag

SEQ ID NO: 8 - DNA, 116 bp, Artificial Sequence
  Synthetic
gtgagttgttaacgctaagcttttgtttgggcactgttggtgagcttagtctttaggtctcctaagagggacagtctatgggaatggatctatgtgtcttggagaagcatggcctt

SEQ ID NO: 9 - DNA, 184 bp, Artificial Sequence
  Synthetic
tttttaaaccccgaacccagtatgtagttattgcttcatgatagctgctctgatgatgatgatgataattattctctttttgactcattggtgacttttgaggctgaatatttttgtcatccccagcaaggctgaattcacatgtttttatggtatataactttcttccccttttttgtaacag

SEQ ID NO: 10 - DNA, 283 bp, Artificial Sequence
  Synthetic
gtaagtgtagacgcattgaattgctttagctctggagatgggtttgagtgtttgctctgtctccgtgatacagaacttagttagaatagttgctggaaattagttggtctagatctaaggatgctttgggctgggtttcatggcttgggctcttatatttgactgttactttttacacccttccttgtggaacactttgccaaggtactgattttgcaagataagatcttcagactcacgagtaccttgccgcttcagtgaactttgtgtgatcctttctgct

SEQ ID NO: 11 - DNA, 171 bp, Artificial Sequence
  Synthetic
tcttttcctccttcctgcatggtttggcctgtccttgccaggtccatctggggtagggctgtcccagcccagtaacaagtccctgcctcccaagccggtacctgcaattccgctcctccctcctgcgttggccgttctgtgtgtgtgactcacctcctcttctgtttaaag

SEQ ID NO: 12 - DNA, 285 bp, Artificial Sequence
  Synthetic
gtgagtcctttgcatggttccattaactgccctttgctgtgaccccttctgtcctgcccacctgggcagggcgccctctctctgggtacctttggagatacttgagtctccctccacctgttctgagagctgactgcccatagaggatgggaagagggcagggcaagtgccctggtggtaggcctcttacgtgagaagttcttgctgggagggaccctggaatccatcccatccagcctcttggcacagagactgcaggcaaccttttcaaggtcacactgctag

SEQ ID NO: 13 - DNA, 142 bp, Artificial Sequence
  Synthetic
aaatcaagatttgggatgtaattcacctctcacttttgtcttcaattccttttaacctctctgtacgtgttctctgtgttcttctgtctggactgtctggctcccggtgccatctctgtgtaacgtgtatccattaacacag

SEQ ID NO: 14 - DNA, 85 bp, Artificial Sequence
  Synthetic
gtaagatgagtctctttgaaccatgggcatattaactaaacacgtgggcaatgtcagctttactggtgtcttttaacattgtctt

SEQ ID NO: 15 - DNA, 243 bp, Artificial Sequence
  Synthetic
gagcctcctgcccctcaccaggccctgttagcatcacctcgggcacctggccacagcaggggccagtcagggcaccccgggatagcacgcccaggccctgtgcaaggcctctggcacttaggagaggcttttgcccctttgtcctctgagcagaagggttggcaaagagggaaggggacaggccagttctgcacctggcctttctccagaatgaaggcctccacctcccgtccgtccccacag

SEQ ID NO: 16 - DNA, 212 bp, Artificial Sequence
  Synthetic
gtacgtgcagtgagtgctgcggaggggcgcagaggcccgcgccctggctggccctgtgcatgcgccttgcgccctgctcccaggtgccactaacccgtaatctggctctgtgtgcagtgctgcccggcagggctgtcgtgtgcgtgttgggtgggaaggcggaggcggcgcggggcgggctggcctctgagcatctggctgcatttagcacg

SEQ ID NO: 17 - DNA, 284 bp, Artificial Sequence
  Synthetic
tttctcagccagtaccccagcctgtcctttaactctttcctacattttccttagtgtctttcagacttggttcagggcgaacagtccatttgctgacctcggtttgttctgttgactcttgggggttggggctggaacccagcagagtgactgtcagactgatccatgagaaggctggcatagcttggtctgaagcagggcttcatagagaccgctgggcttgggagctctgtggaggctctggggtgggcctcttgttagccacaagtctgtttctcctccag

SEQ ID NO: 18 - DNA, 174 bp, Artificial Sequence
  Synthetic
gtaagcgacagctgcttggggagcccagcccctgttctcagcttcctgctttagaagcggagcctggtgctcaccatatgctccctgcctcgcagtctttgttttggttcagggaatttggacgtctctggtgcttcggacgtctctggtgcttcaggtctaggttcctgtctc

SEQ ID NO: 19 - DNA, 153 bp, Artificial Sequence
  Synthetic
gacttcatcacaaaagaagttatgtttccccctaccccatcctttacccagttccagtggagcttccctttggggcatacacacagtctctgatgcaagtgctgatgtgccggtggctggacggtgttcactgtgattcccctctactgctag

SEQ ID NO: 20 - DNA, 209 bp, Artificial Sequence
  Synthetic
gtttgtaactgattggcattggcatgagggagcttggctggtttttagcagtgctgctgattgatgctcatgctccatgctttggcaaaaatctaactaacatgattgggaagaagctggagttttctggctgatgaaggtgttctgtattcttcattgaggaatgttccttttcaattatgaacaccccacccccaacacacacacac

SEQ ID NO: 21 - DNA, 150 bp, Artificial Sequence
  Synthetic
aggtattttttgtttttgataatttagatatttaagattaataaacaataatatagttactacttttcactttgcatcttttgactaattacaatactaatttatttacttcctttcttcattttgctataatacatttggactgcacag

SEQ ID NO: 22 - DNA, 200 bp, Artificial Sequence
  Synthetic
gtaaagtaccatttaacctttttttccaatcaatgtttatactgcctaactatattttacgtgtccattaattattttaaaagcactgcaatagttactttagattttaatatcaaattctaaaactaaccagccataatgtagtgaggtttttaaattgacactggtatcccaattttatttatacagacttttaggaa

SEQ ID NO: 23 - DNA, 75 bp, Unknown
  May be homo sapiens or mus musculus
tgggcagacagaccaccgctccggccacaatgtccaccgcggcctccggcaccaccatggggctggtggaacaag

SEQ ID NO: 24 - DNA, 74 bp, Unknown
  May be homo sapiens or mus musculus
tgggcagacagaccaccgctccggccacaagtccaccgcggcctccggcaccaccaggggctggtggaacaatg

SEQ ID NO: 25 - DNA, 132 bp, Unknown
  May be homo sapiens or mus musculus
accatacagtcaatttaagaagtaggaatggctggccgggcgcggtggctcacgcctgtaatcccagcactttgggaggccaaggcgggcggatcacgaggtcaggagttcgagaccagcctgaccaacatg

SEQ ID NO: 26 - DNA, 131 bp, Unknown
  May be homo sapiens or mus musculus
accatacagtcaatttaagaagtaggaaggctggccgggcgcggtggctcacgcctgtaatcccagcactttgggaggccaaggcgggcggatcacgaggtcaggagttcgagaccagcctgaccaacatg

SEQ ID NO: 27 - DNA, 118 bp, Unknown
  May be homo sapiens or mus musculus
ggtcttactctgttgcccaggctggagtgcagtggcacaatcttggctcactgcaacctctgcctcccgggttcaagcaattctcctgcctcagcctcccgagtagctgggattacag

SEQ ID NO: 28 - DNA, 119 bp, Unknown
  May be homo sapiens or mus musculus
ggtcttactctgttgcccaggctggagtgcagtggcacaatcttggctcactgcaacctctgcctcccgggttcaagcaattctcctgcctcagcctcccgagtagctgggattacatg

SEQ ID NO: 29 - DNA, 105 bp, Unknown
  May be homo sapiens or mus musculus
gtggagtataagaaggatctggaaagtagtagaggtcacagtatcaactactgtgaaacacctcaattcaggaacgtgagcaagatctcaaaatttaccagtgat

SEQ ID NO: 30 - DNA, 105 bp, Unknown; identical to SEQ ID NO: 29
  May be homo sapiens or mus musculus

SEQ ID NO: 31 - DNA, 33 bp, Unknown
  May be homo sapiens or mus musculus
tgccagcagatgtagcatcacctgaaagcggca

SEQ ID NO: 32 - DNA, 33 bp, Unknown
  May be homo sapiens or mus musculus
tgccagcagttgtagcatcacctgaaagcggca

SEQ ID NO: 33 - DNA, 42 bp, Unknown
  May be homo sapiens or mus musculus
ctgcctacttcattcatcatagacagcagtttatctttccag

SEQ ID NO: 34 - DNA, 43 bp, Artificial Sequence
  Synthetic
ctgcctacttcattcatcatagacagcagtttatctttccatg

SEQ ID NO: 35 - DNA, 264 bp, Artificial Sequence
  Synthetic
tggatgcagcactccctccgggattgactgtggcagtggacgcagcaccccttcttctgtcagtactgttagtaccatttgcccaggtgacttgaaagttgcggctaagctggcccctaacattcctttggaaatggaacttcctggtgtgaagattgtacatgctcagtttaatacacctatgcagttgtactcagatgacaatattatggaaacactccagggtcaggtttcaacagccctaggggaaacacctttgatgag

SEQ ID NO: 36 - DNA, 261 bp, Artificial Sequence
  Synthetic
tggattgcagcactccctccgggattgactgtggcagtggacgcagcaccccttcttctgtcagtactgttagtaccatttgcccaggtgacttgaaagttgcggctaagctggcccctaacattcctttggaaggaacttcctggtgtgaagattgtactgctcagtttaatacaccttgcagttgtactcagtgacaatattgtggaaacactccagggtcaggtttcaacagccctaggggaaacacctttgctgatg

SEQ ID NO: 37 - DNA, 45 bp, Artificial Sequence
  Synthetic
aaagaaaagtaaactgttttcgcggctgcgcagaaagaagaacag

SEQ ID NO: 38 - DNA, 46 bp, Artificial Sequence
  Synthetic
aaagaaaagtaaactgttttcgcggctgcgcagaaagaagaacatg

SEQ ID NO: 39 - DNA, 42 bp, Artificial Sequence
  Synthetic
agtccgtgtatctgtcagctaaaggggcccttcctgccagag

SEQ ID NO: 40 - DNA, 43 bp, Artificial Sequence
  Synthetic
agtccgtgtatctgtcagctaaaggggcccttcctgccagatg

SEQ ID NO: 41 - DNA, 120 bp, Artificial Sequence
  Synthetic
gtggcttcccgataataagcctgtctgcctggtggtcatccccttggtggtcttatttgaagatcctctttcctctcatgtggtttcagacgaagctcctccacaaacactgggataaag

SEQ ID NO: 42 - DNA, 121 bp, Artificial Sequence
  Synthetic
gtggcttcccgataataagcctgtctgcctggtggtcatccccttggtggtcttatttgaagatcctctttcctctcaagtggtttcagacgaagctcctccacaaacactgggataaatg

SEQ ID NO: 43 - DNA, 150 bp, Artificial Sequence
  Synthetic
atcctttctctgctactgtagatgctgttgatgatgccattccaagcttaaatcctttcctcacaaaaagtagtggtgatgttcacctttccatttcttcagatgtatctacttttactactaggacacctactcatgaaatgtttgttg

SEQ ID NO: 44 - DNA, 148 bp, Artificial Sequence
  Synthetic
atcctttctctgctactgtagagctgttgtgatccattccaagcttaaatcctttcctcacaaaaagtagtggtgagttcacctttccatttcttcagattgtatctacttttactactaggacacctactcattgaaagtttgtatg

SEQ ID NO: 45 - DNA, 4048 bp, Artificial Sequence
  Synthetic
cctgcaggcagctgcgcgctcgctcgctcactgaggccgcccgggcaaagcccgggcgtcgggcgacctttggtcgcccggcctcagtgagcgagcgagcgcgcagagagggagtggccaactccatcactaggggttcctgcggccgcagccgtgttttagagctagaaatagcaagttaaaataaggctagtccgtagcgcgtgcgccaattctgcagacaaattctagaggtaccacccttcagattaaaaataactgaggtaagggcctgggtaggggaggtggtgtgagacgctcctgtctctcctctatctgcccatcggccctttggggaggaggaatgtgcccaaggactaaaaaaaggccatggagccagaggggcgagggcaacagacctttcatgggcaaaccttggggccctgctgtctagcatgccccactacgggtctaggctgcccatgtaaggaggcaaggcctggggacacccgagatgcctggttataattaacccagacatgtggctgcccccccccccccaacacctgctgcctctaaaaataaccctgtccctggtggatcccctgcatgcgaagatcttcgaacaaggctgtgggggactgagggcaggctgtaacaggcttgggggccagggcttatacgtgcctgggactcccaaagtattactgttccatgttcccggcgaagggccagctgtcccccgccagctagactcagcacttagtttaggaaccagtgagcaagtcagcccttggggcagcccatacaaggccatggggctgggcaagctgcacgcctgggtccggggtgggcacggtgcccgggcaacgagctgaaagctcatctgctctcaggggcccctccctggggacagcccctcctggctagtcacaccctgtaggctcctctatataacccaggggcacaggggctgccctcattctaccaccacctccacagcacagacagacactcaggagccagccagctagcagtggctatcatactggctattatcaggtaagtaatcactcagcatcttttcctgacaatttttttgtagttatgtgactttgttttgtaaatttataaaatactacttgcttctctctttatattactaaaaaataaaaataaaaaaatacaactgtctgaggcttaaattactcttgcattgtccctaagtataattttagttaattttaaaaagcttcaattgctgttacttttgctgtgatgctgtaatgccgggaacgcgtgcacacggtcacaccaacactaataggactgtcctgtctgctgtgtgctcaccacaccctttgggcatgagaagcccccactggggttttctaaggagaaaggaggcaaatgcttttccgtgtcaatcagtccaatcttgttttcactctcttgagcaaaggattctggaaccatctgtcacctaaactttaactctaatcttcttctgcttcctttgtctcttttcttcccttacctcgcccacccctcgtctgtgtccgcccacccctcccttcccctcgtctctaacccggtgctaacagtgggcagacagaccaccgctccggccacaagtccaccgcggcctccggcaccaccaggggctggtggaacaatggtaggtgtgtctcgaccagcgtcccgcccgctcccgcccgtccctcctgccagcatgcagccccctgctgcacgcagccgctactagtaggcagaccagcagacttttttttattgtgatatgggataacctaggcatactgcactgtacactctgacatatgaagtgctctagtcaagtttaactggtgtccacagaggacatggtttaactggaattcgtcaagcctctggttctaatttctcatttgcaggcttctgcatcaacttctaaatataattcacactccttggagaatgagtctataaagaggacgtctcgagatggagtgaatcgagatctcactgaggctgttcctcgacttccaggagaaacactaatcactgacaaagaagttatttacatatgtccttttaatggccccattaagggaagagtttacatcacaaattatcgtctttatttaagaagtttggaaacggattcttctctaatacttgatgttcctctgggtgtgatctcgagaattgaaaaaatgggaggcgcgacaagtagaggagaaaattcctatggtctagatattacttgtaaagacatgagaaacctcagatttgccttgaaacaggaaggccacagcagaagagatatgtttgagatcctcacgagatacgcgtttcccctggctcacagtctgccattatttgcatttttaaatgaagaaaagtttaacgtggatggatggacagtttacaatccagtggaagaatacaggaggcagggcttgcccaatcaccattggagaataacttttattaataagtgctatgagctctgtgacacttaccctgctcttttggtggttccgtatcgtgcctcagatgatgacctccggagagttgcaacttttaggtcccgaaatcgaattccagtgctgtcatggattcatccagaaaataagacggtcattgtgcgttgcagtcagcctcttgtcggtatgagtgggaaacgaaataaagatgatgagaaatatctcgatgttatcagggagactaataaacaaatttctaaactcaccatttatgatgcaagacccagcgtaaatgcagtggccaacaaggcaacaggaggaggatatgaaagtgatgatgcatatcataacgccgaacttttcttcttagacattcataatattcatgttatgcgggaatctttaaaaaaagtgaaggacattgtttatcctaatgtagaagaatctcattggttgtccagtttggagtctactcattggttagaacatatcaagctcgttttgacaggagccattcaagtagcagacaaagtttcttcagggaagagttcagtgcttgtgcattgcagtgacggatgggacaggactgctcagctgacatccttggccatgctgatgttggatagcttctataggagcattgaagggttcgaaatactggtacaaaaagaatggataagttttggacataaatttgcatctcgaataggtcatggtgataaaaaccacaccgatgctgaccgttctcctatttttctccagtttattgattgtgtgtggcaaatgtcaaaacagttccctacagcttttgaattcaatgaacaatttttgattataattttggatcatctgtatagttgccgatttggtactttcttattcaactgtgaatctgctcgagaaagacagaaggttacagaaaggactgtttctttatggtcactgataaacagtaataaagaaaaattcaaaaaccccttctatactaaagaaatcaatcgagttttatatccagttgccagtatgcgtcacttggaactctgggtgaattactacattagatggaaccccaggatcaagcaacaacagccgaatccagtggagcagcgttacatggagctcttagccttacgcgacgaatacataaagcggcttgaggaactgcagctcgccaactctgccaagctttctgatcccccaacttcaccttccagtccttcgcaaatgatgccccatgtgcaaactcacttctacccatacgacgtaccagattacgcttagcttaagatacattgatgagtttggacaaaccacaactagaatgcagtgaaaaaaatgctttatttgtgaaatttgtgatgctattgctttatttgtaaccattataagctgcaataaacaagttctgattttgtagttaacacgtgcgaccgagcggccgcaggaacccctagtgatggagttggccactccctctctgcgcgctcgctcgctcactgaggccgggcgaccaaaggtcgcccgacgcccgggctttgcccgggcggcctcagtgagcgagcgagcgcgcagctgcctgcagg

SEQ ID NO: 46 - DNA, 4048 bp, Artificial Sequence
  Synthetic
cctgcaggcagctgcgcgctcgctcgctcactgaggccgcccgggcaaagcccgggcgtcgggcgacctttggtcgcccggcctcagtgagcgagcgagcgcgcagagagggagtggccaactccatcactaggggttcctgcggccgcagccgtgttttagagctagaaatagcaagttaaaataaggctagtccgtagcgcgtgcgccaattctgcagacaaattctagaggtaccacccttcagattaaaaataactgaggtaagggcctgggtaggggaggtggtgtgagacgctcctgtctctcctctatctgcccatcggccctttggggaggaggaatgtgcccaaggactaaaaaaaggccatggagccagaggggcgagggcaacagacctttcatgggcaaaccttggggccctgctgtctagcatgccccactacgggtctaggctgcccatgtaaggaggcaaggcctggggacacccgagatgcctggttataattaacccagacatgtggctgcccccccccccccaacacctgctgcctctaaaaataaccctgtccctggtggatcccctgcatgcgaagatcttcgaacaaggctgtgggggactgagggcaggctgtaacaggcttgggggccagggcttatacgtgcctgggactcccaaagtattactgttccatgttcccggcgaagggccagctgtcccccgccagctagactcagcacttagtttaggaaccagtgagcaagtcagcccttggggcagcccatacaaggccatggggctgggcaagctgcacgcctgggtccggggtgggcacggtgcccgggcaacgagctgaaagctcatctgctctcaggggcccctccctggggacagcccctcctggctagtcacaccctgtaggctcctctatataacccaggggcacaggggctgccctcattctaccaccacctccacagcacagacagacactcaggagccagccagctagcagtggctatcatactggctattatcaggtaagtaatcactcagcatcttttcctgacaatttttttgtagttatgtgactttgttttgtaaatttataaaatactacttgcttctctctttatattactaaaaaataaaaataaaaaaatacaactgtctgaggcttaaattactcttgcattgtccctaagtataattttagttaattttaaaaagcttcaattgggaaaattccactccctttgttccaattaatcctctctggtttttattgtaaggtgtactttttctttgagtgtcctgtgtggtcctttttaaaaggaggaaatgtcattatgcttcacattcttaagcttctggcaggcagagactattaatttgtttgcttatttaggactaaagaagcttttgttttttttcttcatttctctcttctttctaacttgcttttgtagcttagtaaccaaaactcagcctcagacttgtctttaaattgttttcaaccaccttctgtgccctgagtacctatgcttcctctttcctttgtacagaccatacagtcaatttaagaagtaggaaggctggccgggcgcggtggctcacgcctgtaatcccagcactttgggaggccaaggcgggcggatcacgaggtcaggagttcgagaccagcctgaccaacatggtgagacccctgtctctactcaaaatacaaaaaaattagccgactagtaggcagaccagcagacttttttttattgtgatatgggataacctaggcatactgcactgtacactctgacatatgaagtgctctagtcaagtttaactggtgtccacagaggacatggtttaactggaattcgtcaagcctctggttctaatttctcatttgcaggcttctgcatcaacttctaaatataattcacactccttggagaatgagtctataaagaggacgtctcgagatggagtgaatcgagatctcactgaggctgttcctcgacttccaggagaaacactaatcactgacaaagaagttatttacatatgtccttttaatggccccattaagggaagagtttacatcacaaattatcgtctttatttaagaagtttggaaacggattcttctctaatacttgatgttcctctgggtgtgatctcgagaattgaaaaaatgggaggcgcgacaagtagaggagaaaattcctatggtctagatattacttgtaaagacatgagaaaccttagattcgcgttgaaacaggaaggccacagcagaagagatatgtttgagatcctcacgagatacgcgtttcccctggctcacagtctgccattatttgcatttttaaatgaagaaaagtttaacgtggatggatggacagtttacaatccagtggaagaatacaggaggcagggcttgcccaatcaccattggagaataacttttattaataagtgctatgagctctgtgacacttaccctgctcttttggtggttccgtatcgtgcctcagatgatgacctccggagagttgcaacttttaggtcccgaaatcgaattccagtgctgtcatggattcatccagaaaataagacggtcattgtgcgttgcagtcagcctcttgtcggtatgagtgggaaacgaaataaagatgatgagaaatatctcgatgttatcagggagactaataaacaaatttctaaactcaccatttatgatgcaagacccagcgtaaatgcagtggccaacaaggcaacaggaggaggatatgaaagtgatgatgcatatcataacgccgaacttttcttcttagacattcataatattcatgttatgcgggaatctttaaaaaaagtgaaggacattgtttatcctaatgtagaagaatctcattggttgtccagtttggagtctactcattggttagaacatatcaagctcgttttgacaggagccattcaagtagcagacaaagtttcttcagggaagagttcagtgcttgtgcattgcagtgacggatgggacaggactgctcagctgacatccttggccatgctgatgttggatagcttctataggagcattgaagggttcgaaatactggtacaaaaagaatggataagttttggacataaatttgcatctcgaataggtcatggtgataaaaaccacaccgatgctgaccgttctcctatttttctccagtttattgattgtgtgtggcaaatgtcaaaacagttccctacagcttttgaattcaatgaacaatttttgattataattttggatcatctgtatagttgccgatttggtactttcttattcaactgtgaatctgctcgagaaagacagaaggttacagaaaggactgtttctttatggtcactgataaacagtaataaagaaaaattcaaaaaccccttctatactaaagaaatcaatcgagttttatatccagttgccagtatgcgtcacttggaactctgggtgaattactacattagatggaaccccaggatcaagcaacaacagccgaatccagtggagcagcgttacatggagctcttagccttacgcgacgaatacataaagcggcttgaggaactgcagctcgccaactctgccaagctttctgatcccccaacttcaccttccagtccttcgcaaatgatgccccatgtgcaaactcacttctacccatacgacgtaccagattacgcttagcttaagatacattgatgagtttggacaaaccacaactagaatgcagtgaaaaaaatgctttatttgtgaaatttgtgatgctattgctttatttgtaaccattataagctgcaataaacaagttctgattttgtagttaacacgtgcgaccgagcggccgcaggaacccctagtgatggagttggccactccctctctgcgcgctcgctcgctcactgaggccgggcgaccaaaggtcgcccgacgcccgggctttgcccgggcggcctcagtgagcgagcgagcgcgcagctgcctgcagg

SEQ ID NO: 47 - DNA, 4044 bp, Artificial Sequence
  Synthetic
cctgcaggcagctgcgcgctcgctcgctcactgaggccgcccgggcaaagcccgggcgtcgggcgacctttggtcgcccggcctcagtgagcgagcgagcgcgcagagagggagtggccaactccatcactaggggttcctgcggccgcagccgtgttttagagctagaaatagcaagttaaaataaggctagtccgtagcgcgtgcgccaattctgcagacaaattctagaggtaccacccttcagattaaaaataactgaggtaagggcctgggtaggggaggtggtgtgagacgctcctgtctctcctctatctgcccatcggccctttggggaggaggaatgtgcccaaggactaaaaaaaggccatggagccagaggggcgagggcaacagacctttcatgggcaaaccttggggccctgctgtctagcatgccccactacgggtctaggctgcccatgtaaggaggcaaggcctggggacacccgagatgcctggttataattaacccagacatgtggctgcccccccccccccaacacctgctgcctctaaaaataaccctgtccctggtggatcccctgcatgcgaagatcttcgaacaaggctgtgggggactgagggcaggctgtaacaggcttgggggccagggcttatacgtgcctgggactcccaaagtattactgttccatgttcccggcgaagggccagctgtcccccgccagctagactcagcacttagtttaggaaccagtgagcaagtcagcccttggggcagcccatacaaggccatggggctgggcaagctgcacgcctgggtccggggtgggcacggtgcccgggcaacgagctgaaagctcatctgctctcaggggcccctccctggggacagcccctcctggctagtcacaccctgtaggctcctctatataacccaggggcacaggggctgccctcattctaccaccacctccacagcacagacagacactcaggagccagccagctagcagtggctatcatactggctattatcaggtaagtaatcactcagcatcttttcctgacaatttttttgtagttatgtgactttgttttgtaaatttataaaatactacttgcttctctctttatattactaaaaaataaaaataaaaaaatacaactgtctgaggcttaaattactcttgcattgtccctaagtataattttagttaattttaaaaagcttcaattgcctggatgtgaacttgactctgctacttagatggccctgtgaacttgaccttattacttgcattgttggtgataatttatctggaatgggcactgcatcccaaacttctcaaatggattaaacctgacttgatggtacatttcttggatccaagtgaagtcttttttttcttttcttgacagggtcttactctgttgcccaggctggagtgcagtggcacaatcttggctcactgcaacctctgcctcccgggttcaagcaattctcctgcctcagcctcccgagtagctgggattacatggtatgtgccaccatacttggctaatttttgtatttttagtagagatggggtttcaccatgttggccaggctggtctcgaactcctggcgtcaagtgatcaacccgtctcggcctcccaaaatgctgggattacaggcatgagccactgcacccggccccaagtgaagtcttttaagtgaattactgacctggtaactagtaggcagaccagcagacttttttttattgtgatatgggataacctaggcatactgcactgtacactctgacatatgaagtgctctagtcaagtttaactggtgtccacagaggacatggtttaactggaattcgtcaagcctctggttctaatttctcatttgcaggcttctgcatcaacttctaaatataattcacactccttggagaatgagtctataaagaggacgtctcgagatggagtgaatcgagatctcactgaggctgttcctcgacttccaggagaaacactaatcactgacaaagaagttatttacatatgtccttttaatggccccattaagggaagagtttacatcacaaattatcgtctttatttaagaagtttggaaacggattcttctctaatacttgatgttcctctgggtgtgatctcgagaattgaaaaaatgggaggcgcgacaagtagaggagaaaattcctatggtctagatattacttgtaaagacatgagaaacctaagattcgccttgaaacaggaaggccacagcagaagagatatgtttgagatcctcacgagatacgcgtttcccctggctcacagtctgccattatttgcatttttaaatgaagaaaagtttaacgtggatggatggacagtttacaatccagtggaagaatacaggaggcagggcttgcccaatcaccattggagaataacttttattaataagtgctatgagctctgtgacacttaccctgctcttttggtggttccgtatcgtgcctcagatgatgacctccggagagttgcaacttttaggtcccgaaatcgaattccagtgctgtcatggattcatccagaaaataagacggtcattgtgcgttgcagtcagcctcttgtcggtatgagtgggaaacgaaataaagatgatgagaaatatctcgatgttatcagggagactaataaacaaatttctaaactcaccatttatgatgcaagacccagcgtaaatgcagtggccaacaaggcaacaggaggaggatatgaaagtgatgatgcatatcataacgccgaacttttcttcttagacattcataatattcatgttatgcgggaatctttaaaaaaagtgaaggacattgtttatcctaatgtagaagaatctcattggttgtccagtttggagtctactcattggttagaacatatcaagctcgttttgacaggagccattcaagtagcagacaaagtttcttcagggaagagttcagtgcttgtgcattgcagtgacggatgggacaggactgctcagctgacatccttggccatgctgatgttggatagcttctataggagcattgaagggttcgaaatactggtacaaaaagaatggataagttttggacataaatttgcatctcgaataggtcatggtgataaaaaccacaccgatgctgaccgttctcctatttttctccagtttattgattgtgtgtggcaaatgtcaaaacagttccctacagcttttgaattcaatgaacaatttttgattataattttggatcatctgtatagttgccgatttggtactttcttattcaactgtgaatctgctcgagaaagacagaaggttacagaaaggactgtttctttatggtcactgataaacagtaataaagaaaaattcaaaaaccccttctatactaaagaaatcaatcgagttttatatccagttgccagtatgcgtcacttggaactctgggtgaattactacattagatggaaccccaggatcaagcaacaacagccgaatccagtggagcagcgttacatggagctcttagccttacgcgacgaatacataaagcggcttgaggaactgcagctcgccaactctgccaagctttctgatcccccaacttcaccttccagtccttcgcaaatgatgccccatgtgcaaactcacttctacccatacgacgtaccagattacgcttagcttaagatacattgatgagtttggacaaaccacaactagaatgcagtgaaaaaaatgctttatttgtgaaatttgtgatgctattgctttatttgtaaccattataagctgcaataaacaagttctgattttgtagttaacacgtgcgaccgagcggccgcaggaacccctagtgatggagttggccactccctctctgcgcgctcgctcgctcactgaggccgggcgaccaaaggtcgcccgacgcccgggctttgcccgggcggcctcagtgagcgagcgagcgcgcagctgcctgcagg

SEQ ID NO: 48 - DNA, 3480 bp, Artificial Sequence
  Synthetic
cctgcaggcagctgcgcgctcgctcgctcactgaggccgcccgggcaaagcccgggcgtcgggcgacctttggtcgcccggcctcagtgagcgagcgagcgcgcagagagggagtggccaactccatcactaggggttcctgcggccgcagccgtgttttagagctagaaatagcaagttaaaataaggctagtccgtagcgcgtgcgccaattctgcagacaaattctagaggtaccacccttcagattaaaaataactgaggtaagggcctgggtaggggaggtggtgtgagacgctcctgtctctcctctatctgcccatcggccctttggggaggaggaatgtgcccaaggactaaaaaaaggccatggagccagaggggcgagggcaacagacctttcatgggcaaaccttggggccctgctgtctagcatgccccactacgggtctaggctgcccatgtaaggaggcaaggcctggggacacccgagatgcctggttataattaacccagacatgtggctgcccccccccccccaacacctgctgcctctaaaaataaccctgtccctggtggatcccctgcatgcgaagatcttcgaacaaggctgtgggggactgagggcaggctgtaacaggcttgggggccagggcttatacgtgcctgggactcccaaagtattactgttccatgttcccggcgaagggccagctgtcccccgccagctagactcagcacttagtttaggaaccagtgagcaagtcagcccttggggcagcccatacaaggccatggggctgggcaagctgcacgcctgggtccggggtgggcacggtgcccgggcaacgagctgaaagctcatctgctctcaggggcccctccctggggacagcccctcctggctagtcacaccctgtaggctcctctatataacccaggggcacaggggctgccctcattctaccaccacctccacagcacagacagacactcaggagccagccagctagcagtggctatcatactggctattatcaggtaagtaatcactcagcatcttttcctgacaatttttttgtagttatgtgactttgttttgtaaatttataaaatactacttgcttctctctttatattactaaaaaataaaaataaaaaaatacaactgtctgaggcttaaattactcttgcattgtccctaagtataattttagttaattttaaaaagcttcaattgaccagttttgccattttttgagttatgaaatcttatattatttgttcttgaaagcgactatatgcttttaattttctgaatgaaaccaattatttgctatttattatgattcatttttataaaggaaaatatgtcctgctaacttagcatattctatgcttgatatgttaaaatcttgggttgaaagttttctaaaaatatcctagtcaagtcctgggacattttcaagagtgacttcggatttggttctattgtgtgtctggtgttttgatttccaaggtggagtataagaaggatctggaaagtagtagaggtcacagtatcaactactgtgaaacacctcaattcaggaacgtgagcaagatctcaaaatttaccagtgatgtgagttgttaacgctaagcttttgtttgggcactgttggtgagcttagtctttaggtctcctaagagggacagtctatgggaatggatctatgtgtcttggagaagcatggccttactagtaggcagaccagcagacttttttttattgtgatatgggataacctaggcatactgcactgtacactctgacatatgaagtgctctagtcaagtttaactggtgtccacagaggacatggtttaactggaattcgtcaagcctctggttctaatttctcatttgcagggcttctgcatcaacttctaaatataattcacactccttggagaatgagtctataaagaggacgtctcgagatggagtgaatcgagatctcactgaggctgttcctcgacttccaggagaaacactaatcactgacaaagaagttatttacatatgtccttttaatggccccattaagggaagagtttacatcacaaattatcgtctttatttaagaagtttggaaacggattcttctctaatacttgatgttcctctgggtgtgatctcgagaattgaaaaaatgggaggcgcgacaagtagaggagaaaattcctatggtctagatattacttgtaaagacatgagaaacctgagatttgcgttgaaacaggaaggccacagcagaagagatatgtttgagatcctcacgagatacgcgtttcccctggctcacagtctgccattatttgcatttttaaatgaagaaaagtttaacgtggatggatggacagtttacaatccagtggaagaatacaggaggcagggcttgcccaatcaccattggagaataacttttattaataagtgctatgagctctgtgacacttaccctgctcttttggtggttccgtatcgtgcctcagatgatgacctccggagagttgcaacttttaggtcccgaaatcgaattccagtgctgtcatggattcatccagaaaataagacggtcattgtgcgttgcagtcagcctcttgtcggtatgagtgggaaacgaaataaagatgatgagaaatatctcgatgttatcagggagactaataaacaaatttctaaactcaccatttatgatgcaagacccagcgtaaatgcagtggccaacaaggcaacaggaggaggatatgaaagtgatgatgcatatcataacgccgaacttttcttcttagacattcataatattcatgttatgcgggaatctttaaaaaaagtgaaggacattgtttatcctaatgtagaagaatctcattggttgtccagtttggagtctactcattggttagaacatatcaagctcgttttgacaggagccattcaagtagcagacaaagtttcttcagggaagagttcagtgcttgtgcattgcagtgacggatgggacaggactgctcagctgacatccttggccatgctgatgttggatagcttctataggagcattgaagggttcgaaatactggtacaaaaagaatggataagttttggacataaatttgcatctcgaataggtcatggtgataaaaaccacaccgatgctgaccgttctcctatttttctccagtttattgattgtgtgtggcaaatgtcaaaacagttccctacagcttttgaattcaatgaacaatttttgattataattttggatcatctgtatagttgccgatttggtactttcttattcaactgtgaatctgctcgagaaagacagaaggttacagaaaggactgtttctttatggtcactgataaacagtaataaagaaaaattcaaaaaccccttctatactaaagaaatcaatcgagttttatatcc

SEQ ID NO: 49 - DNA, 4051 bp, Artificial Sequence
  Synthetic
cctgcaggcagctgcgcgctcgctcgctcactgaggccgcccgggcaaagcccgggcgtcgggcgacctttggtcgcccggcctcagtgagcgagcgagcgcgcagagagggagtggccaactccatcactaggggttcctgcggccgcagccgtgttttagagctagaaatagcaagttaaaataaggctagtccgtagcgcgtgcgccaattctgcagacaaattctagaggtaccacccttcagattaaaaataactgaggtaagggcctgggtaggggaggtggtgtgagacgctcctgtctctcctctatctgcccatcggccctttggggaggaggaatgtgcccaaggactaaaaaaaggccatggagccagaggggcgagggcaacagacctttcatgggcaaaccttggggccctgctgtctagcatgccccactacgggtctaggctgcccatgtaaggaggcaaggcctggggacacccgagatgcctggttataattaacccagacatgtggctgcccccccccccccaacacctgctgcctctaaaaataaccctgtccctggtggatcccctgcatgcgaagatcttcgaacaaggctgtgggggactgagggcaggctgtaacaggcttgggggccagggcttatacgtgcctgggactcccaaagtattactgttccatgttcccggcgaagggccagctgtcccccgccagctagactcagcacttagtttaggaaccagtgagcaagtcagcccttggggcagcccatacaaggccatggggctgggcaagctgcacgcctgggtccggggtgggcacggtgcccgggcaacgagctgaaagctcatctgctctcaggggcccctccctggggacagcccctcctggctagtcacaccctgtaggctcctctatataacccaggggcacaggggctgccctcattctaccaccacctccacagcacagacagacactcaggagccagccagctagcagtggctatcatactggctattatcaggtaagtaatcactcagcatcttttcctgacaatttttttgtagttatgtgactttgttttgtaaatttataaaatactacttgcttctctctttatattactaaaaaataaaaataaaaaaatacaactgtctgaggcttaaattactcttgcattgtccctaagtataattttagttaattttaaaaagcttcaattgtttttaaaccccgaacccagtatgtagttattgcttcatgatagctgctctgatgatgatgatgataattattctctttttgactcattggtgacttttgaggctgaatatttttgtcatccccagcaaggctgaattcacatgtttttatggtatataactttcttccccttttttgtaacagtgccagcagttgtagcatcacctgaaagcggcagtaagtgtagacgcattgaattgctttagctctggagatgggtttgagtgtttgctctgtctccgtgatacagaacttagttagaatagttgctggaaattagttggtctagatctaaggatgctttgggctgggtttcatggcttgggctcttatatttgactgttactttttacacccttccttgtggaacactttgccaaggtactgattttgcaagataagatcttcagactcacgagtaccttgccgcttcagtgaactttgtgtgatcctttctgctactagtaggcagaccagcagacttttttttattgtgatatgggataacctaggcatactgcactgtacactctgacatatgaagtgctctagtcaagtttaactggtgtccacagaggacatggtttaactggaattcgtcaagcctctggttctaatttctcatttgcagtggcttctgcatcaacttctaaatataattcacactccttggagaatgagtctataaagaggacgtctcgagatggagtgaatcgagatctcactgaggctgttcctcgacttccaggagaaacactaatcactgacaaagaagttatttacatatgtccttttaatggccccattaagggaagagtttacatcacaaattatcgtctttatttaagaagtttggaaacggattcttctctaatacttgatgttcctctgggtgtgatctcgagaattgaaaaaatgggaggcgcgacaagtagaggagaaaattcctatggtctagatattacttgtaaagacatgagaaatcttagattcgcgttgaaacaggaaggccacagcagaagagatatgtttgagatcctcacgagatacgcgtttcccctggctcacagtctgccattatttgcatttttaaatgaagaaaagtttaacgtggatggatggacagtttacaatccagtggaagaatacaggaggcagggcttgcccaatcaccattggagaataacttttattaataagtgctatgagctctgtgacacttaccctgctcttttggtggttccgtatcgtgcctcagatgatgacctccggagagttgcaacttttaggtcccgaaatcgaattccagtgctgtcatggattcatccagaaaataagacggtcattgtgcgttgcagtcagcctcttgtcggtatgagtgggaaacgaaataaagatgatgagaaatatctcgatgttatcagggagactaataaacaaatttctaaactcaccatttatgatgcaagacccagcgtaaatgcagtggccaacaaggcaacaggaggaggatatgaaagtgatgatgcatatcataacgccgaacttttcttcttagacattcataatattcatgttatgcgggaatctttaaaaaaagtgaaggacattgtttatcctaatgtagaagaatctcattggttgtccagtttggagtctactcattggttagaacatatcaagctcgttttgacaggagccattcaagtagcagacaaagtttcttcagggaagagttcagtgcttgtgcattgcagtgacggatgggacaggactgctcagctgacatccttggccatgctgatgttggatagcttctataggagcattgaagggttcgaaatactggtacaaaaagaatggataagttttggacataaatttgcatctcgaataggtcatggtgataaaaaccacaccgatgctgaccgttctcctatttttctccagtttattgattgtgtgtggcaaatgtcaaaacagttccctacagcttttgaattcaatgaacaatttttgattataattttggatcatctgtatagttgccgatttggtactttcttattcaactgtgaatctgctcgagaaagacagaaggttacagaaaggactgtttctttatggtcactgataaacagtaataaagaaaaattcaaaaaccccttctatactaaagaaatcaatcgagttttatatccagttgccagtatgcgtcacttggaactctgggtgaattactacattagatggaaccccaggatcaagcaacaacagccgaatccagtggagcagcgttacatggagctcttagccttacgcgacgaatacataaagcggcttgaggaactgcagctcgccaactctgccaagctttctgatcccccaacttcaccttccagtccttcgcaaatgatgccccatgtgcaaactcacttctacccatacgacgtaccagattacgcttagcttaagatacattgatgagtttggacaaaccacaactagaatgcagtgaaaaaaatgctttatttgtgaaatttgtgatgctattgctttatttgtaaccattataagctgcaataaacaagttctgattttgtagttaacacgtgcgaccgagcggccgcaggaacccctagtgatggagttggccactccctctctgcgcgctcgctcgctcactgaggccgggcgaccaaaggtcgcccgacgcccgggctttgcccgggcggcctcagtgagcgagcgagcgcgcagctgcctgcagg

SEQ ID NO: 50 - DNA, 4048 bp, Artificial Sequence
  Synthetic
cctgcaggcagctgcgcgctcgctcgctcactgaggccgcccgggcaaagcccgggcgtcgggcgacctttggtcgcccggcctcagtgagcgagcgagcgcgcagagagggagtggccaactccatcactaggggttcctgcggccgcagccgtgttttagagctagaaatagcaagttaaaataaggctagtccgtagcgcgtgcgccaattctgcagacaaattctagaggtaccacccttcagattaaaaataactgaggtaagggcctgggtaggggaggtggtgtgagacgctcctgtctctcctctatctgcccatcggccctttggggaggaggaatgtgcccaaggactaaaaaaaggccatggagccagaggggcgagggcaacagacctttcatgggcaaaccttggggccctgctgtctagcatgccccactacgggtctaggctgcccatgtaaggaggcaaggcctggggacacccgagatgcctggttataattaacccagacatgtggctgcccccccccccccaacacctgctgcctctaaaaataaccctgtccctggtggatcccctgcatgcgaagatcttcgaacaaggctgtgggggactgagggcaggctgtaacaggcttgggggccagggcttatacgtgcctgggactcccaaagtattactgttccatgttcccggcgaagggccagctgtcccccgccagctagactcagcacttagtttaggaaccagtgagcaagtcagcccttggggcagcccatacaaggccatggggctgggcaagctgcacgcctgggtccggggtgggcacggtgcccgggcaacgagctgaaagctcatctgctctcaggggcccctccctggggacagcccctcctggctagtcacaccctgtaggctcctctatataacccaggggcacaggggctgccctcattctaccaccacctccacagcacagacagacactcaggagccagccagctagcagtggctatcatactggctattatcaggtaagtaatcactcagcatcttttcctgacaatttttttgtagttatgtgactttgttttgtaaatttataaaatactacttgcttctctctttatattactaaaaaataaaaataaaaaaatacaactgtctgaggcttaaattactcttgcattgtccctaagtataattttagttaattttaaaaagcttcaattgtcttttcctccttcctgcatggtttggcctgtccttgccaggtccatctggggtagggctgtcccagcccagtaacaagtccctgcctcccaagccggtacctgcaattccgctcctccctcctgcgttggccgttctgtgtgtgtgactcacctcctcttctgtttaaagctgcctacttcattcatcatagacagcagtttatctttccatggtgagtcctttgcatggttccattaactgccctttgctgtgaccccttctgtcctgcccacctgggcagggcgccctctctctgggtacctttggagatacttgagtctccctccacctgttctgagagctgactgcccatagaggatgggaagagggcagggcaagtgccctggtggtaggcctcttacgtgagaagttcttgctgggagggaccctggaatccatcccatccagcctcttggcacagagactgcaggcaaccttttcaaggtcacactgctagactagtaggcagaccagcagacttttttttattgtgatatgggataacctaggcatactgcactgtacactctgacatatgaagtgctctagtcaagtttaactggtgtccacagaggacatggtttaactggaattcgtcaagcctctggttctaatttctcatttgcaggcttctgcatcaacttctaaatataattcacactccttggagaatgagtctataaagaggacgtctcgagatggagtgaatcgagatctcactgaggctgttcctcgacttccaggagaaacactaatcactgacaaagaagttatttacatatgtccttttaatggccccattaagggaagagtttacatcacaaattatcgtctttatttaagaagtttggaaacggattcttctctaatacttgatgttcctctgggtgtgatctcgagaattgaaaaaatgggaggcgcgacaagtagaggagaaaattcctatggtctagatattacttgtaaagacatgagaaacctgagattcgccttgaaacaggaaggccacagcagaagagatatgtttgagatcctcacgagatacgcgtttcccctggctcacagtctgccattatttgcatttttaaatgaagaaaagtttaacgtggatggatggacagtttacaatccagtggaagaatacaggaggcagggcttgcccaatcaccattggagaataacttttattaataagtgctatgagctctgtgacacttaccctgctcttttggtggttccgtatcgtgcctcagatgatgacctccggagagttgcaacttttaggtcccgaaatcgaattccagtgctgtcatggattcatccagaaaataagacggtcattgtgcgttgcagtcagcctcttgtcggtatgagtgggaaacgaaataaagatgatgagaaatatctcgatgttatcagggagactaataaacaaatttctaaactcaccatttatgatgcaagacccagcgtaaatgcagtggccaacaaggcaacaggaggaggatatgaaagtgatgatgcatatcataacgccgaacttttcttcttagacattcataatattcatgttatgcgggaatctttaaaaaaagtgaaggacattgtttatcctaatgtagaagaatctcattggttgtccagtttggagtctactcattggttagaacatatcaagctcgttttgacaggagccattcaagtagcagacaaagtttcttcagggaagagttcagtgcttgtgcattgcagtgacggatgggacaggactgctcagctgacatccttggccatgctgatgttggatagcttctataggagcattgaagggttcgaaatactggtacaaaaagaatggataagttttggacataaatttgcatctcgaataggtcatggtgataaaaaccacaccgatgctgaccgttctcctatttttctccagtttattgattgtgtgtggcaaatgtcaaaacagttccctacagcttttgaattcaatgaacaatttttgattataattttggatcatctgtatagttgccgatttggtactttcttattcaactgtgaatctgctcgagaaagacagaaggttacagaaaggactgtttctttatggtcactgataaacagtaataaagaaaaattcaaaaaccccttctatactaaagaaatcaatcgagttttatatccagttgccagtatgcgtcacttggaactctgggtgaattactacattagatggaaccccaggatcaagcaacaacagccgaatccagtggagcagcgttacatggagctcttagccttacgcgacgaatacataaagcggcttgaggaactgcagctcgccaactctgccaagctttctgatcccccaacttcaccttccagtccttcgcaaatgatgccccatgtgcaaactcacttctacccatacgacgtaccagattacgcttagcttaagatacattgatgagtttggacaaaccacaactagaatgcagtgaaaaaaatgctttatttgtgaaatttgtgatgctattgctttatttgtaaccattataagctgcaataaacaagttctgattttgtagttaacacgtgcgaccgagcggccgcaggaacccctagtgatggagttggccactccctctctgcgcgctcgctcgctcactgaggccgggcgaccaaaggtcgcccgacgcccgggctttgcccgggcggcctcagtgagcgagcgagcgcgcagctgcctgcagg

SEQ ID NO: 51 - DNA, 4037 bp, Artificial Sequence
  Synthetic
cctgcaggcagctgcgcgctcgctcgctcactgaggccgcccgggcaaagcccgggcgtcgggcgacctttggtcgcccggcctcagtgagcgagcgagcgcgcagagagggagtggccaactccatcactaggggttcctgcggccgcagccgtgttttagagctagaaatagcaagttaaaataaggctagtccgtagcgcgtgcgccaattctgcagacaaattctagaggtaccacccttcagattaaaaataactgaggtaagggcctgggtaggggaggtggtgtgagacgctcctgtctctcctctatctgcccatcggccctttggggaggaggaatgtgcccaaggactaaaaaaaggccatggagccagaggggcgagggcaacagacctttcatgggcaaaccttggggccctgctgtctagcatgccccactacgggtctaggctgcccatgtaaggaggcaaggcctggggacacccgagatgcctggttataattaacccagacatgtggctgcccccccccccccaacacctgctgcctctaaaaataaccctgtccctggtggatcccctgcatgcgaagatcttcgaacaaggctgtgggggactgagggcaggctgtaacaggcttgggggccagggcttatacgtgcctgggactcccaaagtattactgttccatgttcccggcgaagggccagctgtcccccgccagctagactcagcacttagtttaggaaccagtgagcaagtcagcccttggggcagcccatacaaggccatggggctgggcaagctgcacgcctgggtccggggtgggcacggtgcccgggcaacgagctgaaagctcatctgctctcaggggcccctccctggggacagcccctcctggctagtcacaccctgtaggctcctctatataacccaggggcacaggggctgccctcattctaccaccacctccacagcacagacagacactcaggagccagccagctagcagtggctatcatactggctattatcaggtaagtaatcactcagcatcttttcctgacaatttttttgtagttatgtgactttgttttgtaaatttataaaatactacttgcttctctctttatattactaaaaaataaaaataaaaaaatacaactgtctgaggcttaaattactcttgcattgtccctaagtataattttagttaattttaaaaagcttcaattgaaatcaagatttgggatgtaattcacctctcacttttgtcttcaattccttttaacctctctgtacgtgttctctgtgttcttctgtctggactgtctggctcccggtgccatctctgtgtaacgtgtatccattaacacagtggattgcagcactccctccgggattgactgtggcagtggacgcagcaccccttcttctgtcagtactgttagtaccatttgcccaggtgacttgaaagttgcggctaagctggcccctaacattcctttggaaggaacttcctggtgtgaagattgtactgctcagtttaatacaccttgcagttgtactcagtgacaatattgtggaaacactccagggtcaggtttcaacagccctaggggaaacacctttgctgatggtaagatgagtctctttgaaccatgggcatattaactaaacacgtgggcaatgtcagctttactggtgtcttttaacattgtcttactagtaggcagaccagcagacttttttttattgtgatatgggataacctaggcatactgcactgtacactctgacatatgaagtgctctagtcaagtttaactggtgtccacagaggacatggtttaactggaattcgtcaagcctctggttctaatttctcatttgcaggcttctgcatcaacttctaaatataattcacactccttggagaatgagtctataaagaggacgtctcgagatggagtgaatcgagatctcactgaggctgttcctcgacttccaggagaaacactaatcactgacaaagaagttatttacatatgtccttttaatggccccattaagggaagagtttacatcacaaattatcgtctttatttaagaagtttggaaacggattcttctctaatacttgatgttcctctgggtgtgatctcgagaattgaaaaaatgggaggcgcgacaagtagaggagaaaattcctatggtctagatattacttgtaaagacatgagaaatctcagattcgccttgaaacaggaaggccacagcagaagagatatgtttgagatcctcacgagatacgcgtttcccctggctcacagtctgccattatttgcatttttaaatgaagaaaagtttaacgtggatggatggacagtttacaatccagtggaagaatacaggaggcagggcttgcccaatcaccattggagaataacttttattaataagtgctatgagctctgtgacacttaccctgctcttttggtggttccgtatcgtgcctcagatgatgacctccggagagttgcaacttttaggtcccgaaatcgaattccagtgctgtcatggattcatccagaaaataagacggtcattgtgcgttgcagtcagcctcttgtcggtatgagtgggaaacgaaataaagatgatgagaaatatctcgatgttatcagggagactaataaacaaatttctaaactcaccatttatgatgcaagacccagcgtaaatgcagtggccaacaaggcaacaggaggaggatatgaaagtgatgatgcatatcataacgccgaacttttcttcttagacattcataatattcatgttatgcgggaatctttaaaaaaagtgaaggacattgtttatcctaatgtagaagaatctcattggttgtccagtttggagtctactcattggttagaacatatcaagctcgttttgacaggagccattcaagtagcagacaaagtttcttcagggaagagttcagtgcttgtgcattgcagtgacggatgggacaggactgctcagctgacatccttggccatgctgatgttggatagcttctataggagcattgaagggttcgaaatactggtacaaaaagaatggataagttttggacataaatttgcatctcgaataggtcatggtgataaaaaccacaccgatgctgaccgttctcctatttttctccagtttattgattgtgtgtggcaaatgtcaaaacagttccctacagcttttgaattcaatgaacaatttttgattataattttggatcatctgtatagttgccgatttggtactttcttattcaactgtgaatctgctcgagaaagacagaaggttacagaaaggactgtttctttatggtcactgataaacagtaataaagaaaaattcaaaaaccccttctatactaaagaaatcaatcgagttttatatccagttgccagtatgcgtcacttggaactctgggtgaattactacattagatggaaccccaggatcaagcaacaacagccgaatccagtggagcagcgttacatggagctcttagccttacgcgacgaatacataaagcggcttgaggaactgcagctcgccaactctgccaagctttctgatcccccaacttcaccttccagtccttcgcaaatgatgccccatgtgcaaactcacttctacccatacgacgtaccagattacgcttagcttaagatacattgatgagtttggacaaaccacaactagaatgcagtgaaaaaaatgctttatttgtgaaatttgtgatgctattgctttatttgtaaccattataagctgcaataaacaagttctgattttgtagttaacacgtgcgaccgagcggccgcaggaacccctagtgatggagttggccactccctctctgcgcgctcgctcgctcactgaggccgggcgaccaaaggtcgcccgacgcccgggctttgcccgggcggcctcagtgagcgagcgagcgcgcagctgcctgcagg

SEQ ID NO: 52 - DNA, 4050 bp, Artificial Sequence
  Synthetic
cctgcaggcagctgcgcgctcgctcgctcactgaggccgcccgggcaaagcccgggcgtcgggcgacctttggtcgcccggcctcagtgagcgagcgagcgcgcagagagggagtggccaactccatcactaggggttcctgcggccgcagccgtgttttagagctagaaatagcaagttaaaataaggctagtccgtagcgcgtgcgccaattctgcagacaaattctagaggtaccacccttcagattaaaaataactgaggtaagggcctgggtaggggaggtggtgtgagacgctcctgtctctcctctatctgcccatcggccctttggggaggaggaatgtgcccaaggactaaaaaaaggccatggagccagaggggcgagggcaacagacctttcatgggcaaaccttggggccctgctgtctagcatgccccactacgggtctaggctgcccatgtaaggaggcaaggcctggggacacccgagatgcctggttataattaacccagacatgtggctgcccccccccccccaacacctgctgcctctaaaaataaccctgtccctggtggatcccctgcatgcgaagatcttcgaacaaggctgtgggggactgagggcaggctgtaacaggcttgggggccagggcttatacgtgcctgggactcccaaagtattactgttccatgttcccggcgaagggccagctgtcccccgccagctagactcagcacttagtttaggaaccagtgagcaagtcagcccttggggcagcccatacaaggccatggggctgggcaagctgcacgcctgggtccggggtgggcacggtgcccgggcaacgagctgaaagctcatctgctctcaggggcccctccctggggacagcccctcctggctagtcacaccctgtaggctcctctatataacccaggggcacaggggctgccctcattctaccaccacctccacagcacagacagacactcaggagccagccagctagcagtggctatcatactggctattatcaggtaagtaatcactcagcatcttttcctgacaatttttttgtagttatgtgactttgttttgtaaatttataaaatactacttgcttctctctttatattactaaaaaataaaaataaaaaaatacaactgtctgaggcttaaattactcttgcattgtccctaagtataattttagttaattttaaaaagcttcaattggagcctcctgcccctcaccaggccctgttagcatcacctcgggcacctggccacagcaggggccagtcagggcaccccgggatagcacgcccaggccctgtgcaaggcctctggcacttaggagaggcttttgcccctttgtcctctgagcagaagggttggcaaagagggaaggggacaggccagttctgcacctggcctttctccagaatgaaggcctccacctcccgtccgtccccacagaaagaaaagtaaactgttttcgcggctgcgcagaaagaagaacatggtacgtgcagtgagtgctgcggaggggcgcagaggcccgcgccctggctggccctgtgcatgcgccttgcgccctgctcccaggtgccactaacccgtaatctggctctgtgtgcagtgctgcccggcagggctgtcgtgtgcgtgttgggtgggaaggcggaggcggcgcggggcgggctggcctctgagcatctggctgcatttagcacgactagtaggcagaccagcagacttttttttattgtgatatgggataacctaggcatactgcactgtacactctgacatatgaagtgctctagtcaagtttaactggtgtccacagaggacatggtttaactggaattcgtcaagcctctggttctaatttctcatttgcaggcttctgcatcaacttctaaatataattcacactccttggagaatgagtctataaagaggacgtctcgagatggagtgaatcgagatctcactgaggctgttcctcgacttccaggagaaacactaatcactgacaaagaagttatttacatatgtccttttaatggccccattaagggaagagtttacatcacaaattatcgtctttatttaagaagtttggaaacggattcttctctaatacttgatgttcctctgggtgtgatctcgagaattgaaaaaatgggaggcgcgacaagtagaggagaaaattcctatggtctagatattacttgtaaagacatgagaaaccttagatttgctttgaaacaggaaggccacagcagaagagatatgtttgagatcctcacgagatacgcgtttcccctggctcacagtctgccattatttgcatttttaaatgaagaaaagtttaacgtggatggatggacagtttacaatccagtggaagaatacaggaggcagggcttgcccaatcaccattggagaataacttttattaataagtgctatgagctctgtgacacttaccctgctcttttggtggttccgtatcgtgcctcagatgatgacctccggagagttgcaacttttaggtcccgaaatcgaattccagtgctgtcatggattcatccagaaaataagacggtcattgtgcgttgcagtcagcctcttgtcggtatgagtgggaaacgaaataaagatgatgagaaatatctcgatgttatcagggagactaataaacaaatttctaaactcaccatttatgatgcaagacccagcgtaaatgcagtggccaacaaggcaacaggaggaggatatgaaagtgatgatgcatatcataacgccgaacttttcttcttagacattcataatattcatgttatgcgggaatctttaaaaaaagtgaaggacattgtttatcctaatgtagaagaatctcattggttgtccagtttggagtctactcattggttagaacatatcaagctcgttttgacaggagccattcaagtagcagacaaagtttcttcagggaagagttcagtgcttgtgcattgcagtgacggatgggacaggactgctcagctgacatccttggccatgctgatgttggatagcttctataggagcattgaagggttcgaaatactggtacaaaaagaatggataagttttggacataaatttgcatctcgaataggtcatggtgataaaaaccacaccgatgctgaccgttctcctatttttctccagtttattgattgtgtgtggcaaatgtcaaaacagttccctacagcttttgaattcaatgaacaatttttgattataattttggatcatctgtatagttgccgatttggtactttcttattcaactgtgaatctgctcgagaaagacagaaggttacagaaaggactgtttctttatggtcactgataaacagtaataaagaaaaattcaaaaaccccttctatactaaagaaatcaatcgagttttatatccagttgccagtatgcgtcacttggaactctgggtgaattactacattagatggaaccccaggatcaagcaacaacagccgaatccagtggagcagcgttacatggagctcttagccttacgcgacgaatacataaagcggcttgaggaactgcagctcgccaactctgccaagctttctgatcccccaacttcaccttccagtccttcgcaaatgatgccccatgtgcaaactcacttctacccatacgacgtaccagattacgcttagcttaagatacattgatgagtttggacaaaccacaactagaatgcagtgaaaaaaatgctttatttgtgaaatttgtgatgctattgctttatttgtaaccattataagctgcaataaacaagttctgattttgtagttaacacgtgcgaccgagcggccgcaggaacccctagtgatggagttggccactccctctctgcgcgctcgctcgctcactgaggccgggcgaccaaaggtcgcccgacgcccgggctttgcccgggcggcctcagtgagcgagcgagcgcgcagctgcctgcagg

SEQ ID NO: 53 - DNA, 4050 bp, Artificial Sequence
  Synthetic
cctgcaggcagctgcgcgctcgctcgctcactgaggccgcccgggcaaagcccgggcgtcgggcgacctttggtcgcccggcctcagtgagcgagcgagcgcgcagagagggagtggccaactccatcactaggggttcctgcggccgcagccgtgttttagagctagaaatagcaagttaaaataaggctagtccgtagcgcgtgcgccaattctgcagacaaattctagaggtaccacccttcagattaaaaataactgaggtaagggcctgggtaggggaggtggtgtgagacgctcctgtctctcctctatctgcccatcggccctttggggaggaggaatgtgcccaaggactaaaaaaaggccatggagccagaggggcgagggcaacagacctttcatgggcaaaccttggggccctgctgtctagcatgccccactacgggtctaggctgcccatgtaaggaggcaaggcctggggacacccgagatgcctggttataattaacccagacatgtggctgcccccccccccccaacacctgctgcctctaaaaataaccctgtccctggtggatcccctgcatgcgaagatcttcgaacaaggctgtgggggactgagggcaggctgtaacaggcttgggggccagggcttatacgtgcctgggactcccaaagtattactgttccatgttcccggcgaagggccagctgtcccccgccagctagactcagcacttagtttaggaaccagtgagcaagtcagcccttggggcagcccatacaaggccatggggctgggcaagctgcacgcctgggtccggggtgggcacggtgcccgggcaacgagctgaaagctcatctgctctcaggggcccctccctggggacagcccctcctggctagtcacaccctgtaggctcctctatataacccaggggcacaggggctgccctcattctaccaccacctccacagcacagacagacactcaggagccagccagctagcagtggctatcatactggctattatcaggtaagtaatcactcagcatcttttcctgacaatttttttgtagttatgtgactttgttttgtaaatttataaaatactacttgcttctctctttatattactaaaaaataaaaataaaaaaatacaactgtctgaggcttaaattactcttgcattgtccctaagtataattttagttaattttaaaaagcttcaattgtttctcagccagtaccccagcctgtcctttaactctttcctacattttccttagtgtctttcagacttggttcagggcgaacagtccatttgctgacctcggtttgttctgttgactcttgggggttggggctggaacccagcagagtgactgtcagactgatccatgagaaggctggcatagcttggtctgaagcagggcttcatagagaccgctgggcttgggagctctgtggaggctctggggtgggcctcttgttagccacaagtctgtttctcctccagagtccgtgtatctgtcagctaaaggggcccttcctgccagatggtaagcgacagctgcttggggagcccagcccctgttctcagcttcctgctttagaagcggagcctggtgctcaccatatgctccctgcctcgcagtctttgttttggttcagggaatttggacgtctctggtgcttcggacgtctctggtgcttcaggtctaggttcctgtctcactagtaggcagaccagcagacttttttttattgtgatatgggataacctaggcatactgcactgtacactctgacatatgaagtgctctagtcaagtttaactggtgtccacagaggacatggtttaactggaattcgtcaagcctctggttctaatttctcatttgcaggcttctgcatcaacttctaaatataattcacactccttggagaatgagtctataaagaggacgtctcgagatggagtgaatcgagatctcactgaggctgttcctcgacttccaggagaaacactaatcactgacaaagaagttatttacatatgtccttttaatggccccattaagggaagagtttacatcacaaattatcgtctttatttaagaagtttggaaacggattcttctctaatacttgatgttcctctgggtgtgatctcgagaattgaaaaaatgggaggcgcgacaagtagaggagaaaattcctatggtctagatattacttgtaaagacatgagaaacctcagatttgcattgaaacaggaaggccacagcagaagagatatgtttgagatcctcacgagatacgcgtttcccctggctcacagtctgccattatttgcatttttaaatgaagaaaagtttaacgtggatggatggacagtttacaatccagtggaagaatacaggaggcagggcttgcccaatcaccattggagaataacttttattaataagtgctatgagctctgtgacacttaccctgctcttttggtggttccgtatcgtgcctcagatgatgacctccggagagttgcaacttttaggtcccgaaatcgaattccagtgctgtcatggattcatccagaaaataagacggtcattgtgcgttgcagtcagcctcttgtcggtatgagtgggaaacgaaataaagatgatgagaaatatctcgatgttatcagggagactaataaacaaatttctaaactcaccatttatgatgcaagacccagcgtaaatgcagtggccaacaaggcaacaggaggaggatatgaaagtgatgatgcatatcataacgccgaacttttcttcttagacattcataatattcatgttatgcgggaatctttaaaaaaagtgaaggacattgtttatcctaatgtagaagaatctcattggttgtccagtttggagtctactcattggttagaacatatcaagctcgttttgacaggagccattcaagtagcagacaaagtttcttcagggaagagttcagtgcttgtgcattgcagtgacggatgggacaggactgctcagctgacatccttggccatgctgatgttggatagcttctataggagcattgaagggttcgaaatactggtacaaaaagaatggataagttttggacataaatttgcatctcgaataggtcatggtgataaaaaccacaccgatgctgaccgttctcctatttttctccagtttattgattgtgtgtggcaaatgtcaaaacagttccctacagcttttgaattcaatgaacaatttttgattataattttggatcatctgtatagttgccgatttggtactttcttattcaactgtgaatctgctcgagaaagacagaaggttacagaaaggactgtttctttatggtcactgataaacagtaataaagaaaaattcaaaaaccccttctatactaaagaaatcaatcgagttttatatccagttgccagtatgcgtcacttggaactctgggtgaattactacattagatggaaccccaggatcaagcaacaacagccgaatccagtggagcagcgttacatggagctcttagccttacgcgacgaatacataaagcggcttgaggaactgcagctcgccaactctgccaagctttctgatcccccaacttcaccttccagtccttcgcaaatgatgccccatgtgcaaactcacttctacccatacgacgtaccagattacgcttagcttaagatacattgatgagtttggacaaaccacaactagaatgcagtgaaaaaaatgctttatttgtgaaatttgtgatgctattgctttatttgtaaccattataagctgcaataaacaagttctgattttgtagttaacacgtgcgaccgagcggccgcaggaacccctagtgatggagttggccactccctctctgcgcgctcgctcgctcactgaggccgggcgaccaaaggtcgcccgacgcccgggctttgcccgggcggcctcagtgagcgagcgagcgcgcagctgcctgcagg

SEQ ID NO: 54 - DNA, 4032 bp, Artificial Sequence
  Synthetic
cctgcaggcagctgcgcgctcgctcgctcactgaggccgcccgggcaaagcccgggcgtcgggcgacctttggtcgcccggcctcagtgagcgagcgagcgcgcagagagggagtggccaactccatcactaggggttcctgcggccgcagccgtgttttagagctagaaatagcaagttaaaataaggctagtccgtagcgcgtgcgccaattctgcagacaaattctagaggtaccacccttcagattaaaaataactgaggtaagggcctgggtaggggaggtggtgtgagacgctcctgtctctcctctatctgcccatcggccctttggggaggaggaatgtgcccaaggactaaaaaaaggccatggagccagaggggcgagggcaacagacctttcatgggcaaaccttggggccctgctgtctagcatgccccactacgggtctaggctgcccatgtaaggaggcaaggcctggggacacccgagatgcctggttataattaacccagacatgtggctgcccccccccccccaacacctgctgcctctaaaaataaccctgtccctggtggatcccctgcatgcgaagatcttcgaacaaggctgtgggggactgagggcaggctgtaacaggcttgggggccagggcttatacgtgcctgggactcccaaagtattactgttccatgttcccggcgaagggccagctgtcccccgccagctagactcagcacttagtttaggaaccagtgagcaagtcagcccttggggcagcccatacaaggccatggggctgggcaagctgcacgcctgggtccggggtgggcacggtgcccgggcaacgagctgaaagctcatctgctctcaggggcccctccctggggacagcccctcctggctagtcacaccctgtaggctcctctatataacccaggggcacaggggctgccctcattctaccaccacctccacagcacagacagacactcaggagccagccagctagcagtggctatcatactggctattatcaggtaagtaatcactcagcatcttttcctgacaatttttttgtagttatgtgactttgttttgtaaatttataaaatactacttgcttctctctttatattactaaaaaataaaaataaaaaaatacaactgtctgaggcttaaattactcttgcattgtccctaagtataattttagttaattttaaaaagcttcaattggacttcatcacaaaagaagttatgtttccccctaccccatcctttacccagttccagtggagcttccctttggggcatacacacagtctctgatgcaagtgctgatgtgccggtggctggacggtgttcactgtgattcccctctactgctaggtggcttcccgataataagcctgtctgcctggtggtcatccccttggtggtcttatttgaagatcctctttcctctcaagtggtttcagacgaagctcctccacaaacactgggataaatggtttgtaactgattggcattggcatgagggagcttggctggtttttagcagtgctgctgattgatgctcatgctccatgctttggcaaaaatctaactaacatgattgggaagaagctggagttttctggctgatgaaggtgttctgtattcttcattgaggaatgttccttttcaattatgaacaccccacccccaacacacacacacactagtaggcagaccagcagacttttttttattgtgatatgggataacctaggcatactgcactgtacactctgacatatgaagtgctctagtcaagtttaactggtgtccacagaggacatggtttaactggaattcgtcaagcctctggttctaatttctcatttgcaggcttctgcatcaacttctaaatataattcacactccttggagaatgagtctataaagaggacgtctcgagatggagtgaatcgagatctcactgaggctgttcctcgacttccaggagaaacactaatcactgacaaagaagttatttacatatgtccttttaatggccccattaagggaagagtttacatcacaaattatcgtctttatttaagaagtttggaaacggattcttctctaatacttgatgttcctctgggtgtgatctcgagaattgaaaaaatgggaggcgcgacaagtagaggagaaaattcctatggtctagatattacttgtaaagacatgagaaaccttagatttgcgttgaaacaggaaggccacagcagaagagatatgtttgagatcctcacgagatacgcgtttcccctggctcacagtctgccattatttgcatttttaaatgaagaaaagtttaacgtggatggatggacagtttacaatccagtggaagaatacaggaggcagggcttgcccaatcaccattggagaataacttttattaataagtgctatgagctctgtgacacttaccctgctcttttggtggttccgtatcgtgcctcagatgatgacctccggagagttgcaacttttaggtcccgaaatcgaattccagtgctgtcatggattcatccagaaaataagacggtcattgtgcgttgcagtcagcctcttgtcggtatgagtgggaaacgaaataaagatgatgagaaatatctcgatgttatcagggagactaataaacaaatttctaaactcaccatttatgatgcaagacccagcgtaaatgcagtggccaacaaggcaacaggaggaggatatgaaagtgatgatgcatatcataacgccgaacttttcttcttagacattcataatattcatgttatgcgggaatctttaaaaaaagtgaaggacattgtttatcctaatgtagaagaatctcattggttgtccagtttggagtctactcattggttagaacatatcaagctcgttttgacaggagccattcaagtagcagacaaagtttcttcagggaagagttcagtgcttgtgcattgcagtgacggatgggacaggactgctcagctgacatccttggccatgctgatgttggatagcttctataggagcattgaagggttcgaaatactggtacaaaaagaatggataagttttggacataaatttgcatctcgaataggtcatggtgataaaaaccacaccgatgctgaccgttctcctatttttctccagtttattgattgtgtgtggcaaatgtcaaaacagttccctacagcttttgaattcaatgaacaatttttgattataattttggatcatctgtatagttgccgatttggtactttcttattcaactgtgaatctgctcgagaaagacagaaggttacagaaaggactgtttctttatggtcactgataaacagtaataaagaaaaattcaaaaaccccttctatactaaagaaatcaatcgagttttatatccagttgccagtatgcgtcacttggaactctgggtgaattactacattagatggaaccccaggatcaagcaacaacagccgaatccagtggagcagcgttacatggagctcttagccttacgcgacgaatacataaagcggcttgaggaactgcagctcgccaactctgccaagctttctgatcccccaacttcaccttccagtccttcgcaaatgatgccccatgtgcaaactcacttctacccatacgacgtaccagattacgcttagcttaagatacattgatgagtttggacaaaccacaactagaatgcagtgaaaaaaatgctttatttgtgaaatttgtgatgctattgctttatttgtaaccattataagctgcaataaacaagttctgattttgtagttaacacgtgcgaccgagcggccgcaggaacccctagtgatggagttggccactccctctctgcgcgctcgctcgctcactgaggccgggcgaccaaaggtcgcccgacgcccgggctttgcccgggcggcctcagtgagcgagcgagcgcgcagctgcctgcagg

SEQ ID NO: 55 - DNA, 4047 bp, Artificial Sequence
  Synthetic
cctgcaggcagctgcgcgctcgctcgctcactgaggccgcccgggcaaagcccgggcgtcgggcgacctttggtcgcccggcctcagtgagcgagcgagcgcgcagagagggagtggccaactccatcactaggggttcctgcggccgcagccgtgttttagagctagaaatagcaagttaaaataaggctagtccgtagcgcgtgcgccaattctgcagacaaattctagaggtaccacccttcagattaaaaataactgaggtaagggcctgggtaggggaggtggtgtgagacgctcctgtctctcctctatctgcccatcggccctttggggaggaggaatgtgcccaaggactaaaaaaaggccatggagccagaggggcgagggcaacagacctttcatgggcaaaccttggggccctgctgtctagcatgccccactacgggtctaggctgcccatgtaaggaggcaaggcctggggacacccgagatgcctggttataattaacccagacatgtggctgcccccccccccccaacacctgctgcctctaaaaataaccctgtccctggtggatcccctgcatgcgaagatcttcgaacaaggctgtgggggactgagggcaggctgtaacaggcttgggggccagggcttatacgtgcctgggactcccaaagtattactgttccatgttcccggcgaagggccagctgtcccccgccagctagactcagcacttagtttaggaaccagtgagcaagtcagcccttggggcagcccatacaaggccatggggctgggcaagctgcacgcctgggtccggggtgggcacggtgcccgggcaacgagctgaaagctcatctgctctcaggggcccctccctggggacagcccctcctggctagtcacaccctgtaggctcctctatataacccaggggcacaggggctgccctcattctaccaccacctccacagcacagacagacactcaggagccagccagctagcagtggctatcatactggctattatcaggtaagtaatcactcagcatcttttcctgacaatttttttgtagttatgtgactttgttttgtaaatttataaaatactacttgcttctctctttatattactaaaaaataaaaataaaaaaatacaactgtctgaggcttaaattactcttgcattgtccctaagtataattttagttaattttaaaaagcttcaattgaggtattttttgtttttgataatttagatatttaagattaataaacaataatatagttactacttttcactttgcatcttttgactaattacaatactaatttatttacttcctttcttcattttgctataatacatttggactgcacagatcctttctctgctactgtagagctgttgtgatccattccaagcttaaatcctttcctcacaaaaagtagtggtgagttcacctttccatttcttcagattgtatctacttttactactaggacacctactcattgaaagtttgtatggtaaagtaccatttaacctttttttccaatcaatgtttatactgcctaactatattttacgtgtccattaattattttaaaagcactgcaatagttactttagattttaatatcaaattctaaaactaaccagccataatgtagtgaggtttttaaattgacactggtatcccaattttatttatacagacttttaggaaactagtaggcagaccagcagacttttttttattgtgatatgggataacctaggcatactgcactgtacactctgacatatgaagtgctctagtcaagtttaactggtgtccacagaggacatggtttaactggaattcgtcaagcctctggttctaatttctcatttgcaggcttctgcatcaacttctaaatataattcacactccttggagaatgagtctataaagaggacgtctcgagatggagtgaatcgagatctcactgaggctgttcctcgacttccaggagaaacactaatcactgacaaagaagttatttacatatgtccttttaatggccccattaagggaagagtttacatcacaaattatcgtctttatttaagaagtttggaaacggattcttctctaatacttgatgttcctctgggtgtgatctcgagaattgaaaaaatgggaggcgcgacaagtagaggagaaaattcctatggtctagatattacttgtaaagacatgagaaatctaagattcgctttgaaacaggaaggccacagcagaagagatatgtttgagatcctcacgagatacgcgtttcccctggctcacagtctgccattatttgcatttttaaatgaagaaaagtttaacgtggatggatggacagtttacaatccagtggaagaatacaggaggcagggcttgcccaatcaccattggagaataacttttattaataagtgctatgagctctgtgacacttaccctgctcttttggtggttccgtatcgtgcctcagatgatgacctccggagagttgcaacttttaggtcccgaaatcgaattccagtgctgtcatggattcatccagaaaataagacggtcattgtgcgttgcagtcagcctcttgtcggtatgagtgggaaacgaaataaagatgatgagaaatatctcgatgttatcagggagactaataaacaaatttctaaactcaccatttatgatgcaagacccagcgtaaatgcagtggccaacaaggcaacaggaggaggatatgaaagtgatgatgcatatcataacgccgaacttttcttcttagacattcataatattcatgttatgcgggaatctttaaaaaaagtgaaggacattgtttatcctaatgtagaagaatctcattggttgtccagtttggagtctactcattggttagaacatatcaagctcgttttgacaggagccattcaagtagcagacaaagtttcttcagggaagagttcagtgcttgtgcattgcagtgacggatgggacaggactgctcagctgacatccttggccatgctgatgttggatagcttctataggagcattgaagggttcgaaatactggtacaaaaagaatggataagttttggacataaatttgcatctcgaataggtcatggtgataaaaaccacaccgatgctgaccgttctcctatttttctccagtttattgattgtgtgtggcaaatgtcaaaacagttccctacagcttttgaattcaatgaacaatttttgattataattttggatcatctgtatagttgccgatttggtactttcttattcaactgtgaatctgctcgagaaagacagaaggttacagaaaggactgtttctttatggtcactgataaacagtaataaagaaaaattcaaaaaccccttctatactaaagaaatcaatcgagttttatatccagttgccagtatgcgtcacttggaactctgggtgaattactacattagatggaaccccaggatcaagcaacaacagccgaatccagtggagcagcgttacatggagctcttagccttacgcgacgaatacataaagcggcttgaggaactgcagctcgccaactctgccaagctttctgatcccccaacttcaccttccagtccttcgcaaatgatgccccatgtgcaaactcacttctacccatacgacgtaccagattacgcttagcttaagatacattgatgagtttggacaaaccacaactagaatgcagtgaaaaaaatgctttatttgtgaaatttgtgatgctattgctttatttgtaaccattataagctgcaataaacaagttctgattttgtagttaacacgtgcgaccgagcggccgcaggaacccctagtgatggagttggccactccctctctgcgcgctcgctcgctcactgaggccgggcgaccaaaggtcgcccgacgcccgggctttgcccgggcggcctcagtgagcgagcgagcgcgcagctgcctgcagg

SEQ ID NO: 56 - DNA, 23 bp, Artificial Sequence
  Synthetic
ttctaatttctcatttgcaggct

SEQ ID NO: 57 - DNA, 60 bp, Artificial Sequence
  Synthetic
gcttctgcatcaacttctaaatataattcacactccttggagaatgagtctataaagagg

SEQ ID NO: 58 - protein, 20 aa, Artificial Sequence
  Synthetic
ASASTSKYNSHSLENESIKR

SEQ ID NO: 59 - DNA, 60 bp, Artificial Sequence
  Synthetic
acgtctcgagatggagtgaatcgagatctcactgaggctgttccycgacttccaggagaa

SEQ ID NO: 60 - protein, 20 aa, Artificial Sequence
  Synthetic
TSRDGVNRDLTEAVPRLPGE

SEQ ID NO: 61 - DNA, 60 bp, Artificial Sequence
  Synthetic
acactaatcactgacaaagaagttatttacatatgtccttttaatggccccattaaggga

SEQ ID NO: 62 - protein, 20 aa, Artificial Sequence
  Synthetic
TLITDKEVIYICPFNGPIKG

SEQ ID NO: 63 - protein, 5 aa, Artificial Sequence
  Synthetic
NLRFA

SEQ ID NO: 64 - DNA, 15 bp, Artificial Sequence
  Synthetic
aatctaagattcgct

SEQ ID NO: 65 - DNA, 15 bp, Artificial Sequence
  Synthetic
aacctcagatttgca

SEQ ID NO: 66 - DNA, 15 bp, Artificial Sequence
  Synthetic
aaccttagatttgct

SEQ ID NO: 67 - DNA, 15 bp, Artificial Sequence
  Synthetic
aaccttagattcgcg

SEQ ID NO: 68 - DNA, 15 bp, Artificial Sequence
  Synthetic
aaccttagatttgcg

SEQ ID NO: 69 - DNA, 15 bp, Artificial Sequence
  Synthetic
aacctgagattcgcc

SEQ ID NO: 70 - DNA, 15 bp, Artificial Sequence
  Synthetic
aacctaagattcgcc

SEQ ID NO: 71 - DNA, 15 bp, Artificial Sequence
  Synthetic
aacctgagatttgcg

SEQ ID NO: 72 - DNA, 15 bp, Artificial Sequence
  Synthetic
aatctcagattcgcc

SEQ ID NO: 73 - DNA, 15 bp, Artificial Sequence
  Synthetic
aatctaagattcgct

SEQ ID NO: 74 - DNA, 15 bp, Artificial Sequence
  Synthetic
aaccttagattcgcc

SEQ ID NO: 75 - DNA, 15 bp, Artificial Sequence
  Synthetic
aatcttagattcgcg

SEQ ID NO: 76 - DNA, 34 bp, Homo sapiens
aatgaaggcctccacctcccgtccgtccccacag

SEQ ID NO: 77 - DNA, 34 bp, Macaca mulatta; identical to SEQ ID NO: 76

SEQ ID NO: 78 - DNA, 32 bp, Mus musculus
aatgaagcatccacactccaccatccccacag

SEQ ID NO: 79 - DNA, 34 bp, Canis familiaris
aatgaaggcctctgcgtcccgtccgttcccacag

SEQ ID NO: 80 - DNA, 33 bp, Elephas maximus
aatgaaggcctccacaccccgtccatcccacag

SEQ ID NO: 81 - DNA, 23 bp, Artificial Sequence
  Synthetic
cctcccgtccgtccccacagaaa

SEQ ID NO: 82 - DNA, 23 bp, Artificial Sequence
  Synthetic
ccacccgtccttccccacagaaa

SEQ ID NO: 83 - DNA, 23 bp, Artificial Sequence
  Synthetic
cccaccgtccgtccccacagaaa

SEQ ID NO: 84 - DNA, 23 bp, Artificial Sequence
  Synthetic
ccacccgtccgttcccacagaaa

SEQ ID NO: 85 - DNA, 23 bp, Artificial Sequence
  Synthetic
cctcccgtcccaccccacagaaa

SEQ ID NO: 86 - DNA, 23 bp, Artificial Sequence
  Synthetic
cctcccgcacgtccccacagaaa

SEQ ID NO: 87 - DNA, 23 bp, Artificial Sequence
  Synthetic
cctcccgtccgcacccacagaaa

SEQ ID NO: 88 - DNA, 212 bp, Artificial Sequence; identical to SEQ ID NO: 16
  Synthetic

SEQ ID NO: 89 - DNA, 217 bp, Artificial Sequence
  Synthetic
gtacgtgcagtgagtgctgcggaggggcgcagaggcccgcgccctggctggccctgtgcatgctgccttgcgccctgctcccaggtgctcactaacccgtaatctgctgctctgtgtgcatgtgctgcccggcagggctgtcgtgtgcgtgttgggtgggaaggcggaggcggcgcggggcgggctggcctctgagcatctggctgcatttagcacg

SEQ ID NO: 90 - DNA, 11 bp, Artificial Sequence
  Synthetic
ggaacaatggc

SEQ ID NO: 91 - DNA, 11 bp, Artificial Sequence
  Synthetic
accaacatggc

SEQ ID NO: 92 - DNA, 11 bp, Artificial Sequence
  Synthetic
gattacatggc

SEQ ID NO: 93 - DNA, 11 bp, Artificial Sequence
  Synthetic
ccagtgatggc

SEQ ID NO: 94 - DNA, 11 bp, Artificial Sequence
  Synthetic
agcggcatggc

SEQ ID NO: 95 - DNA, 11 bp, Artificial Sequence
  Synthetic
ctttccatggc

SEQ ID NO: 96 - DNA, 11 bp, Artificial Sequence
  Synthetic
ttgctgatggc

SEQ ID NO: 97 - DNA, 11 bp, Artificial Sequence
  Synthetic
aagaacatggc

SEQ ID NO: 98 - DNA, 11 bp, Artificial Sequence
  Synthetic
tgccagatggc

SEQ ID NO: 99 - DNA, 11 bp, Artificial Sequence
  Synthetic
ggataaatggc

SEQ ID NO: 100 - DNA, 11 bp, Artificial Sequence
  Synthetic
gtttgtatggc

SEQ ID NO: 101 - DNA, 15 bp, Artificial Sequence
  Synthetic
  misc_feature (6)..(6): n is a, c, g, or t
  misc_feature (15)..(15): n is a, c, g, or t
aayctnagattygcn

SEQ ID NO: 102 - DNA, 27 bp, Artificial Sequence
  Synthetic
agtggctatcatactggctattatcag

SEQ ID NO: 103 - DNA, 199 bp, Artificial Sequence
  Synthetic
gtaagtaatcactcagcatcttttcctgacaatttttttgtagttatgtgactttgttttgtaaatttataaaatactacttgcttctctctttatattactaaaaaataaaaataaaaaaatacaactgtctgaggcttaaattactcttgcattgtccctaagtataattttagttaattttaaaaagcttcaattg

SEQ ID NO: 104 - DNA, 167 bp, Artificial Sequence
  Synthetic
actagtaggcagaccagcagacttttattgtgatatgggataacctaggcatactgcactgtacactctgacatatgaagtgctctagtcaagtttaactggtgtccacagaggacatggtttaactggaattcgtcaagcctctggttctaatttctcatttgcag

SEQ ID NO: 105 - DNA, 4060 bp, Artificial Sequence
  Synthetic
  misc_feature (2076)..(2085): n is a, c, g, or t
cctgcaggcagctgcgcgctcgctcgctcactgaggccgcccgggcaaagcccgggcgtcgggcgacctttggtcgcccggcctcagtgagcgagcgagcgcgcagagagggagtggccaactccatcactaggggttcctgcggccgcagccgtgttttagagctagaaatagcaagttaaaataaggctagtccgtagcgcgtgcgccaattctgcagacaaattctagaggtaccacccttcagattaaaaataactgaggtaagggcctgggtaggggaggtggtgtgagacgctcctgtctctcctctatctgcccatcggccctttggggaggaggaatgtgcccaaggactaaaaaaaggccatggagccagaggggcgagggcaacagacctttcatgggcaaaccttggggccctgctgtctagcatgccccactacgggtctaggctgcccatgtaaggaggcaaggcctggggacacccgagatgcctggttataattaacccagacatgtggctgcccccccccccccaacacctgctgcctctaaaaataaccctgtccctggtggatcccctgcatgcgaagatcttcgaacaaggctgtgggggactgagggcaggctgtaacaggcttgggggccagggcttatacgtgcctgggactcccaaagtattactgttccatgttcccggcgaagggccagctgtcccccgccagctagactcagcacttagtttaggaaccagtgagcaagtcagcccttggggcagcccatacaaggccatggggctgggcaagctgcacgcctgggtccggggtgggcacggtgcccgggcaacgagctgaaagctcatctgctctcaggggcccctccctggggacagcccctcctggctagtcacaccctgtaggctcctctatataacccaggggcacaggggctgccctcattctaccaccacctccacagcacagacagacactcaggagccagccagctagcagtggctatcatactggctattatcaggtaagtaatcactcagcatcttttcctgacaatttttttgtagttatgtgactttgttttgtaaatttataaaatactacttgcttctctctttatattactaaaaaataaaaataaaaaaatacaactgtctgaggcttaaattactcttgcattgtccctaagtataattttagttaattttaaaaagcttcaattggagcctcctgcccctcaccaggccctgttagcatcacctcgggcacctggccacagcaggggccagtcagggcaccccgggatagcacgcccaggccctgtgcaaggcctctggcacttaggagaggcttttgcccctttgtcctctgagcagaagggttggcaaagagggaaggggacaggccagttctgcacctggcctttctccagaatgaaggcctccacctcccgtccgtccccacagaaagaaaagtaaactgttttcgcggctgcgcagaaagaagaacatggtacgtgcagtgagtgctgcggaggggcgcagaggcccgcgccctggctggccctgtgcatgcgccttgcgccctgctcccaggtgccactaacccgtaatctggctctgtgtgcagtgctgcccggcagggctgtcgtgtgcgtgttgggtgggaaggcggaggcggcgcggggcgggctggcctctgagcatctggctgcatttagcacgactagtaggcagaccagcagacttttttttattgtgatatgggataacctaggcatactgcactgtacactctgacatatgaagtgctctagtcaagtttaactggtgtccacagaggacatggtttaactggaattcgtcaagcctctggttctaatttctcatttgcaggcttctgcatcaacttctaaatataattcacactccttggagaatgagtctataaagaggacgtctcgagatggagtgaatcgagatctcactgaggctgttcctcgacttccaggagaaacactaatcactgacaaagaagttatttacatatgtccatttannnnnnnnnnatggccccattaagggaagagtttacatcacaaattatcgtctttatttaagaagtttggaaacggattcttctctaatacttgatgttcctctgggtgtgatctcgagaattgaaaaaatgggaggcgcgacaagtagaggagaaaattcctatggtctagatattacttgtaaagacatgagaaacctgaggttcgctttgaaacaggaaggccacagcagaagagatatgtttgagatcctcacgagatacgcgtttcccctggctcacagtctgccattatttgcatttttaaatgaagaaaagtttaacgtggatggatggacagtttacaatccagtggaagaatacaggaggcagggcttgcccaatcaccattggagaataacttttattaataagtgctatgagctctgtgacacttaccctgctcttttggtggttccgtatcgtgcctcagatgatgacctccggagagttgcaacttttaggtcccgaaatcgaattccagtgctgtcatggattcatccagaaaataagacggtcattgtgcgttgcagtcagcctcttgtcggtatgagtgggaaacgaaataaagatgatgagaaatatctcgatgttatcagggagactaataaacaaatttctaaactcaccatttatgatgcaagacccagcgtaaatgcagtggccaacaaggcaacaggaggaggatatgaaagtgatgatgcatatcataacgccgaacttttcttcttagacattcataatattcatgttatgcgggaatctttaaaaaaagtgaaggacattgtttatcctaatgtagaagaatctcattggttgtccagtttggagtctactcattggttagaacatatcaagctcgttttgacaggagccattcaagtagcagacaaagtttcttcagggaagagttcagtgcttgtgcattgcagtgacggatgggacaggactgctcagctgacatccttggccatgctgatgttggatagcttctataggagcattgaagggttcgaaatactggtacaaaaagaatggataagttttggacataaatttgcatctcgaataggtcatggtgataaaaaccacaccgatgctgaccgttctcctatttttctccagtttattgattgtgtgtggcaaatgtcaaaacagttccctacagcttttgaattcaatgaacaatttttgattataattttggatcatctgtatagttgccgatttggtactttcttattcaactgtgaatctgctcgagaaagacagaaggttacagaaaggactgtttctttatggtcactgataaacagtaataaagaaaaattcaaaaaccccttctatactaaagaaatcaatcgagttttatatccagttgccagtatgcgtcacttggaactctgggtgaattactacattagatggaaccccaggatcaagcaacaacagccgaatccagtggagcagcgttacatggagctcttagccttacgcgacgaatacataaagcggcttgaggaactgcagctcgccaactctgccaagctttctgatcccccaacttcaccttccagtccttcgcaaatgatgccccatgtgcaaactcacttctacccatacgacgtaccagattacgcttagcttaagatacattgatgagtttggacaaaccacaactagaatgcagtgaaaaaaatgctttatttgtgaaatttgtgatgctattgctttatttgtaaccattataagctgcaataaacaagttctgattttgtagttaacacgtgcgaccgagcggccgcaggaacccctagtgatggagttggccactccctctctgcgcgctcgctcgctcactgaggccgggcgaccaaaggtcgcccgacgcccgggctttgcccgggcggcctcagtgagcgagcgagcgcgcagctgcctgcagg

SEQ ID NO: 106 - DNA, 4714 bp, Artificial Sequence
  Synthetic
  misc_feature (2138)..(2147): n is a, c, g, or t
cctgcaggcagctgcgcgctcgctcgctcactgaggccgcccgggcaaagcccgggcgtcgggcgacctttggtcgcccggcctcagtgagcgagcgagcgcgcagagagggagtggccaactccatcactaggggttcctgcggccgcagccgtgttttagagctagaaatagcaagttaaaataaggctagtccgtagcgcgtgcgccaattctgcagacaaattctagaggtaccacccttcagattaaaaataactgaggtaagggcctgggtaggggaggtggtgtgagacgctcctgtctctcctctatctgcccatcggccctttggggaggaggaatgtgcccaaggactaaaaaaaggccatggagccagaggggcgagggcaacagacctttcatgggcaaaccttggggccctgctgtctagcatgccccactacgggtctaggctgcccatgtaaggaggcaaggcctggggacacccgagatgcctggttataattaacccagacatgtggctgcccccccccccccaacacctgctgcctctaaaaataaccctgtccctggtggatcccctgcatgcgaagatcttcgaacaaggctgtgggggactgagggcaggctgtaacaggcttgggggccagggcttatacgtgcctgggactcccaaagtattactgttccatgttcccggcgaagggccagctgtcccccgccagctagactcagcacttagtttaggaaccagtgagcaagtcagcccttggggcagcccatacaaggccatggggctgggcaagctgcacgcctgggtccggggtgggcacggtgcccgggcaacgagctgaaagctcatctgctctcaggggcccctccctggggacagcccctcctggctagtcacaccctgtaggctcctctatataacccaggggcacaggggctgccctcattctaccaccacctccacagcacagacagacactcaggagccagccagctagcagtggctatcatactggctattatcaggtaagtaatcactcagcatcttttcctgacaatttttttgtagttatgtgactttgttttgtaaatttataaaatactacttgcttctctctttatattactaaaaaataaaaataaaaaaatacaactgtctgaggcttaaattactcttgcattgtccctaagtataattttagttaattttaaaaagcttcaattggagcctcctgcccctcaccaggccctgttagcatcacctcgggcacctggccacagcaggggccagtcagggcaccccgggatagcacgcccaggccctgtgcaaggcctctggcacttaggagaggcttttgcccctttgtcctctgagcagaagggttggcaaagagggaaggggacaggccagttctgcacctggcctttctccagaatgaaggcctccacctcccgtccgtccccacagaaagaaaagtaaactgttttcgcggctgcgcagaaagaagaacatggtacgtgcagtgagtgctgcggaggggcgcagaggcccgcgccctggctggccctgtgcatgcgccttgcgccctgctcccaggtgccactaacccgtaatctggctctgtgtgcagtgctgcccggcagggctgtcgtgtgcgtgttgggtgggaaggcggaggcggcgcggggcgggctggcctctgagcatctggctgcatttagcacgactagtaggcagaccagcagacttttttttattgtgatatgggataacctaggcatactgcactgtacactctgacatatgaagtgctctagtcaagtttaactggtgtccacagaggacatggtttaactggaattcgtcaagcctctggttctaatttctcatttgcagccgaccgtcattagcgcatctgtggctccaaggacagcggctgagccccggtccccagggccagttcctcacccggcccagagcaaggccactgaggctgggggtggaaacccaagtggcatctattcagccatcatcagccgcaattttcctattatcggagtgaaagagaagacattcgagcaacttcacaagaaatgtcttgaaaagaaagttctttatgtannnnnnnnnngaccctgagttcccaccggacgagacctctctcttttatagccagaagttccccatccagttcgtctggaagagacctccggaaatatgtgagaatccccgatttatcattgatggagccaacagaactgacatctgtcaaggagagctaggggactgctggtttctcgcagccattgcctgcctgaccctgaaccagcaccttcttttccgagtcataccccatgatcaaagtttcatcgaaaactacgcagggatcttccacttccagttctggcgctatggagagtgggtggacgtggttatagatgactgcctgccaacgtacaacaatcaactggttttcaccaagtccaaccaccgcaatgagttctggagtgctctgctggagaaggcttatgctaagctccatggttcctacgaagctctgaaaggtgggaacaccacagaggccatggaggacttcacaggaggggtggcagagttttttgagatcagggatgctcctagtgacatgtacaagatcatgaagaaagccatcgagagaggctccctcatgggctgctccattgatgatggcacgaacatgacctatggaacctctccttctggtctgaacatgggggagttgattgcacggatggtaaggaatatggataactcactgctccaggactcagacctcgaccccagaggctcagatgaaagaccgacccggacaatcattccggttcagtatgagacaagaatggcctgcgggctggtcagaggtcacgcctactctgtcacggggctggatgaggtcccgttcaaaggtgagaaagtgaagctggtgcggctgcggaatccgtggggccaggtggagtggaacggttcttggagtgatagatggaaggactggagctttgtggacaaagatgagaaggcccgtctgcagcaccaggtcactgaggatggagagttctggatgtcctatgaggatttcatctaccatttcacaaagttggagatctgcaacctcacggccgatgctctgcagtctgacaagcttcagacctggacagtgtctgtgaacgagggccgctgggtacggggttgctctgccggaggctgccgcaacttcccagatactttctggaccaaccctcagtaccgtctgaagctcctggaggaggacgatgaccctgatgactcggaggtgatttgcagcttcctggtggccctgatgcagaagaaccggcggaaggaccggaagctaggggccagtctcttcaccattggcttcgccatctacgaggttcccaaagagatgcacgggaacaagcagcacctgcagaaggacttcttcctgtacaacgcctccaaggccaggagcaaaacctacatcaacatgcgggaggtgtcccagcgcttccgcctgcctcccagcgagtacgtcatcgtgccctccacctacgagccccaccaggagggggaattcatcctccgggtcttctctgaaaagaggaacctctctgaggaagttgaaaataccatctccgtggatcggccagtgaaaaagaaaaaaaccaagcccatcatcttcgtttcggacagagcaaacagcaacaaggagctgggtgtggaccaggagtcagaggagggcaaaggcaaaacaagccctgataagcaaaagcagtccccacagccacagcctggcagctctgatcaggaaagtgaggaacagcaacaattccggaacattttcaagcagatagcaggagatgacatggagatctgtgcagatgagctcaagaaggtccttaacacagtcgtgaacaaacacaaggacctgaagacacacgggttcacactggagtcctgccgtagcatgattgcgctcatggatacagatggctctggaaagctcaacctgcaggagttccaccacctctggaacaagattaaggcctggcagaaaattttcaaacactatgacacagaccagtccggcaccatcaacagctacgagatgcgaaatgcagtcaacgacgcaggattccacctcaacaaccagctctatgacatcattaccatgcggtacgcagacaaacacatgaacatcgactttgacagtttcatctgctgcttcgttaggctggagggcatgttcagagcttttcatgcatttgacaaggatggagatggtatcatcaagctcaacgttctggagtggctgcagctcaccatgtatgcctacccatacgacgtaccagattacgcttagcttaagatacattgatgagtttggacaaaccacaactagaatgcagtgaaaaaaatgctttatttgtgaaatttgtgatgctattgctttatttgtaaccattataagctgcaataaacaagttctgattttgtagttaacacgtgcgaccgagcggccgcaggaacccctagtgatggagttggccactccctctctgcgcgctcgctcgctcactgaggccgggcgaccaaaggtcgcccgacgcccgggctttgcccgggcggcctcagtgagcgagcgagcgcgcagctgcctgcagg

SEQ ID NO: 107 - DNA, 501 bp, Artificial Sequence
  Synthetic
gagcctcctgcccctcaccaggccctgttagcatcacctcgggcacctggccacagcaggggccagtcagggcaccccgggatagcacgcccaggccctgtgcaaggcctctggcacttaggagaggcttttgcccctttgtcctctgagcagaagggttggcaaagagggaaggggacaggccagttctgcacctggcctttctccagaatgaaggcctccacctcccgtccgtccccacagaaagaaaagtaaactgttttcgcggctgcgcagaaagaagaacatggtacgtgcagtgagtgctgcggaggggcgcagaggcccgcgccctggctggccctgtgcatgcgccttgcgccctgctcccaggtgccactaacccgtaatctggctctgtgtgcagtgctgcccggcagggctgtcgtgtgcgtgttgggtgggaaggcggaggcggcgcggggcgggctggcctctgagcatctggctgcatttagcacg

SEQ ID NO: 108 - DNA, 502 bp, Artificial Sequence
  Synthetic
gagcctcctgcccctcaccaggccctgttagcatcacctcgggcacctggccacagcaggggccagtcagggcaccccgggatagcacgcccaggccctgtgcaaggcctctggcacttaggagaggcttttgcccctttgtcctctgagcagaagggttggcaaagagggaaggggacaggccagttctgcacctggcctttctccagaatgaaggcctccacctcccgtccgtccccacagaaagaaaagtaaactgttttcgcggctgcgcagaaagaagaacatggtacgtgcagtgagtgctgcggaggggcgcagaggcccgcgccctggctggccctgtgcatgcgccttgcgccctgctcccaggtgccactaacccgtaatctggctctgtgtgcatgtgctgcccggcagggctgtcgtgtgcgtgttgggtgggaaggcggaggcggcgcggggcgggctggcctctgagcatctggctgcatttagcacg

SEQ ID NO: 109 - DNA, 503 bp, Artificial Sequence
  Synthetic
gagcctcctgcccctcaccaggccctgttagcatcacctcgggcacctggccacagcaggggccagtcagggcaccccgggatagcacgcccaggccctgtgcaaggcctctggcacttaggagaggcttttgcccctttgtcctctgagcagaagggttggcaaagagggaaggggacaggccagttctgcacctggcctttctccagaatgaaggcctccacctcccgtccgtccccacagaaagaaaagtaaactgttttcgcggctgcgcagaaagaagaacatggtacgtgcagtgagtgctgcggaggggcgcagaggcccgcgccctggctggccctgtgcatgcgccttgcgccctgctcccaggtgccactaacccgtaatctgctgctctgtgtgcagtgctgcccggcagggctgtcgtgtgcgtgttgggtgggaaggcggaggcggcgcggggcgggctggcctctgagcatctggctgcatttagcacg

SEQ ID NO: 110 - DNA, 504 bp, Artificial Sequence
  Synthetic
gagcctcctgcccctcaccaggccctgttagcatcacctcgggcacctggccacagcaggggccagtcagggcaccccgggatagcacgcccaggccctgtgcaaggcctctggcacttaggagaggcttttgcccctttgtcctctgagcagaagggttggcaaagagggaaggggacaggccagttctgcacctggcctttctccagaatgaaggcctccacctcccgtccgtccccacagaaagaaaagtaaactgttttcgcggctgcgcagaaagaagaacatggtacgtgcagtgagtgctgcggaggggcgcagaggcccgcgccctggctggccctgtgcatgcgccttgcgccctgctcccaggtgccactaacccgtaatctgctgctctgtgtgcatgtgctgcccggcagggctgtcgtgtgcgtgttgggtgggaaggcggaggcggcgcggggcgggctggcctctgagcatctggctgcatttagcacg

SEQ ID NO: 111 - DNA, 502 bp, Artificial Sequence
  Synthetic
gagcctcctgcccctcaccaggccctgttagcatcacctcgggcacctggccacagcaggggccagtcagggcaccccgggatagcacgcccaggccctgtgcaaggcctctggcacttaggagaggcttttgcccctttgtcctctgagcagaagggttggcaaagagggaaggggacaggccagttctgcacctggcctttctccagaatgaaggcctccacctcccgtccgtccccacagaaagaaaagtaaactgttttcgcggctgcgcagaaagaagaacatggtacgtgcagtgagtgctgcggaggggcgcagaggcccgcgccctggctggccctgtgcatgcgccttgcgccctgctcccaggtgctcactaacccgtaatctggctctgtgtgcagtgctgcccggcagggctgtcgtgtgcgtgttgggtgggaaggcggaggcggcgcggggcgggctggcctctgagcatctggctgcatttagcacg

SEQ ID NO: 112 - DNA, 503 bp, Artificial Sequence
  Synthetic
gagcctcctgcccctcaccaggccctgttagcatcacctcgggcacctggccacagcaggggccagtcagggcaccccgggatagcacgcccaggccctgtgcaaggcctctggcacttaggagaggcttttgcccctttgtcctctgagcagaagggttggcaaagagggaaggggacaggccagttctgcacctggcctttctccagaatgaaggcctccacctcccgtccgtccccacagaaagaaaagtaaactgttttcgcggctgcgcagaaagaagaacatggtacgtgcagtgagtgctgcggaggggcgcagaggcccgcgccctggctggccctgtgcatgcgccttgcgccctgctcccaggtgctcactaacccgtaatctggctctgtgtgcatgtgctgcccggcagggctgtcgtgtgcgtgttgggtgggaaggcggaggcggcgcggggcgggctggcctctgagcatctggctgcatttagcacg

SEQ ID NO: 113 - DNA, 504 bp, Artificial Sequence
  Synthetic
gagcctcctgcccctcaccaggccctgttagcatcacctcgggcacctggccacagcaggggccagtcagggcaccccgggatagcacgcccaggccctgtgcaaggcctctggcacttaggagaggcttttgcccctttgtcctctgagcagaagggttggcaaagagggaaggggacaggccagttctgcacctggcctttctccagaatgaaggcctccacctcccgtccgtccccacagaaagaaaagtaaactgttttcgcggctgcgcagaaagaagaacatggtacgtgcagtgagtgctgcggaggggcgcagaggcccgcgccctggctggccctgtgcatgcgccttgcgccctgctcccaggtgctcactaacccgtaatctgctgctctgtgtgcagtgctgcccggcagggctgtcgtgtgcgtgttgggtgggaaggcggaggcggcgcggggcgggctggcctctgagcatctggctgcatttagcacg

SEQ ID NO: 114 - DNA, 505 bp, Artificial Sequence
  Synthetic
gagcctcctgcccctcaccaggccctgttagcatcacctcgggcacctggccacagcaggggccagtcagggcaccccgggatagcacgcccaggccctgtgcaaggcctctggcacttaggagaggcttttgcccctttgtcctctgagcagaagggttggcaaagagggaaggggacaggccagttctgcacctggcctttctccagaatgaaggcctccacctcccgtccgtccccacagaaagaaaagtaaactgttttcgcggctgcgcagaaagaagaacatggtacgtgcagtgagtgctgcggaggggcgcagaggcccgcgccctggctggccctgtgcatgcgccttgcgccctgctcccaggtgctcactaacccgtaatctgctgctctgtgtgcatgtgctgcccggcagggctgtcgtgtgcgtgttgggtgggaaggcggaggcggcgcggggcgggctggcctctgagcatctggctgcatttagcacg

SEQ ID NO: 115 - DNA, 502 bp, Artificial Sequence
  Synthetic
gagcctcctgcccctcaccaggccctgttagcatcacctcgggcacctggccacagcaggggccagtcagggcaccccgggatagcacgcccaggccctgtgcaaggcctctggcacttaggagaggcttttgcccctttgtcctctgagcagaagggttggcaaagagggaaggggacaggccagttctgcacctggcctttctccagaatgaaggcctccacctcccgtccgtccccacagaaagaaaagtaaactgttttcgcggctgcgcagaaagaagaacatggtacgtgcagtgagtgctgcggaggggcgcagaggcccgcgccctggctggccctgtgcatgctgccttgcgccctgctcccaggtgccactaacccgtaatctggctctgtgtgcagtgctgcccggcagggctgtcgtgtgcgtgttgggtgggaaggcggaggcggcgcggggcgggctggcctctgagcatctggctgcatttagcacg

SEQ ID NO: 116 - DNA, 503 bp, Artificial Sequence
  Synthetic
gagcctcctgcccctcaccaggccctgttagcatcacctcgggcacctggccacagcaggggccagtcagggcaccccgggatagcacgcccaggccctgtgcaaggcctctggcacttaggagaggcttttgcccctttgtcctctgagcagaagggttggcaaagagggaaggggacaggccagttctgcacctggcctttctccagaatgaaggcctccacctcccgtccgtccccacagaaagaaaagtaaactgttttcgcggctgcgcagaaagaagaacatggtacgtgcagtgagtgctgcggaggggcgcagaggcccgcgccctggctggccctgtgcatgctgccttgcgccctgctcccaggtgccactaacccgtaatctggctctgtgtgcatgtgctgcccggcagggctgtcgtgtgcgtgttgggtgggaaggcggaggcggcgcggggcgggctggcctctgagcatctggctgcatttagcacg

SEQ ID NO: 117 - DNA, 504 bp, Artificial Sequence
  Synthetic
gagcctcctgcccctcaccaggccctgttagcatcacctcgggcacctggccacagcaggggccagtcagggcaccccgggatagcacgcccaggccctgtgcaaggcctctggcacttaggagaggcttttgcccctttgtcctctgagcagaagggttggcaaagagggaaggggacaggccagttctgcacctggcctttctccagaatgaaggcctccacctcccgtccgtccccacagaaagaaaagtaaactgttttcgcggctgcgcagaaagaagaacatggtacgtgcagtgagtgctgcggaggggcgcagaggcccgcgccctggctggccctgtgcatgctgccttgcgccctgctcccaggtgccactaacccgtaatctgctgctctgtgtgcagtgctgcccggcagggctgtcgtgtgcgtgttgggtgggaaggcggaggcggcgcggggcgggctggcctctgagcatctggctgcatttagcacg

SEQ ID NO: 118 - DNA, 505 bp, Artificial Sequence
  Synthetic
gagcctcctgcccctcaccaggccctgttagcatcacctcgggcacctggccacagcaggggccagtcagggcaccccgggatagcacgcccaggccctgtgcaaggcctctggcacttaggagaggcttttgcccctttgtcctctgagcagaagggttggcaaagagggaaggggacaggccagttctgcacctggcctttctccagaatgaaggcctccacctcccgtccgtccccacagaaagaaaagtaaactgttttcgcggctgcgcagaaagaagaacatggtacgtgcagtgagtgctgcggaggggcgcagaggcccgcgccctggctggccctgtgcatgctgccttgcgccctgctcccaggtgccactaacccgtaatctgctgctctgtgtgcatgtgctgcccggcagggctgtcgtgtgcgtgttgggtgggaaggcggaggcggcgcggggcgggctggcctctgagcatctggctgcatttagcacg

SEQ ID NO: 119 - DNA, 503 bp, Artificial Sequence
  Synthetic
gagcctcctgcccctcaccaggccctgttagcatcacctcgggcacctggccacagcaggggccagtcagggcaccccgggatagcacgcccaggccctgtgcaaggcctctggcacttaggagaggcttttgcccctttgtcctctgagcagaagggttggcaaagagggaaggggacaggccagttctgcacctggcctttctccagaatgaaggcctccacctcccgtccgtccccacagaaagaaaagtaaactgttttcgcggctgcgcagaaagaagaacatggtacgtgcagtgagtgctgcggaggggcgcagaggcccgcgccctggctggccctgtgcatgctgccttgcgccctgctcccaggtgctcactaacccgtaatctggctctgtgtgcagtgctgcccggcagggctgtcgtgtgcgtgttgggtgggaaggcggaggcggcgcggggcgggctggcctctgagcatctggctgcatttagcacg

SEQ ID NO: 120 - DNA, 504 bp, Artificial Sequence
  Synthetic
gagcctcctgcccctcaccaggccctgttagcatcacctcgggcacctggccacagcaggggccagtcagggcaccccgggatagcacgcccaggccctgtgcaaggcctctggcacttaggagaggcttttgcccctttgtcctctgagcagaagggttggcaaagagggaaggggacaggccagttctgcacctggcctttctccagaatgaaggcctccacctcccgtccgtccccacagaaagaaaagtaaactgttttcgcggctgcgcagaaagaagaacatggtacgtgcagtgagtgctgcggaggggcgcagaggcccgcgccctggctggccctgtgcatgctgccttgcgccctgctcccaggtgctcactaacccgtaatctggctctgtgtgcatgtgctgcccggcagggctgtcgtgtgcgtgttgggtgggaaggcggaggcggcgcggggcgggctggcctctgagcatctggctgcatttagcacg

SEQ ID NO: 121 - DNA, 505 bp, Artificial Sequence
  Synthetic
gagcctcctgcccctcaccaggccctgttagcatcacctcgggcacctggccacagcaggggccagtcagggcaccccgggatagcacgcccaggccctgtgcaaggcctctggcacttaggagaggcttttgcccctttgtcctctgagcagaagggttggcaaagagggaaggggacaggccagttctgcacctggcctttctccagaatgaaggcctccacctcccgtccgtccccacagaaagaaaagtaaactgttttcgcggctgcgcagaaagaagaacatggtacgtgcagtgagtgctgcggaggggcgcagaggcccgcgccctggctggccctgtgcatgctgccttgcgccctgctcccaggtgctcactaacccgtaatctgctgctctgtgtgcagtgctgcccggcagggctgtcgtgtgcgtgttgggtgggaaggcggaggcggcgcggggcgggctggcctctgagcatctggctgcatttagcacg

SEQ ID NO: 122 - DNA, 506 bp, Artificial Sequence
  Synthetic
gagcctcctgcccctcaccaggccctgttagcatcacctcgggcacctggccacagcaggggccagtcagggcaccccgggatagcacgcccaggccctgtgcaaggcctctggcacttaggagaggcttttgcccctttgtcctctgagcagaagggttggcaaagagggaaggggacaggccagttctgcacctggcctttctccagaatgaaggcctccacctcccgtccgtccccacagaaagaaaagtaaactgttttcgcggctgcgcagaaagaagaacatggtacgtgcagtgagtgctgcggaggggcgcagaggcccgcgccctggctggccctgtgcatgctgccttgcgccctgctcccaggtgctcactaacccgtaatctgctgctctgtgtgcatgtgctgcccggcagggctgtcgtgtgcgtgttgggtgggaaggcggaggcggcgcggggcgggctggcctctgagcatctggctgcatttagcacg

SEQ ID NO: 123 - DNA, 501 bp, Artificial Sequence
  Synthetic
gagcctcctgcccctcaccaggccctgttagcatcacctcgggcacctggccacagcaggggccagtcagggcaccccgggatagcacgcccaggccctgtgcaaggcctctggcacttaggagaggcttttgcccctttgtcctctgagcagaagggttggcaaagagggaaggggacaggccagttctgcacctggcctttctccagaatgaaggcctccacctcccgtccgtccccacagaaagaaaagtaaactgttttcgcggctgcgcagaaagaagaacatggtaagtgcagtgagtgctgcggaggggcgcagaggcccgcgccctggctggccctgtgcatgcgccttgcgccctgctcccaggtgccactaacccgtaatctggctctgtgtgcagtgctgcccggcagggctgtcgtgtgcgtgttgggtgggaaggcggaggcggcgcggggcgggctggcctctgagcatctggctgcatttagcacg

SEQ ID NO: 124 - DNA, 502 bp, Artificial Sequence
  Synthetic
gagcctcctgcccctcaccaggccctgttagcatcacctcgggcacctggccacagcaggggccagtcagggcaccccgggatagcacgcccaggccctgtgcaaggcctctggcacttaggagaggcttttgcccctttgtcctctgagcagaagggttggcaaagagggaaggggacaggccagttctgcacctggcctttctccagaatgaaggcctccacctcccgtccgtccccacagaaagaaaagtaaactgttttcgcggctgcgcagaaagaagaacatggtaagtgcagtgagtgctgcggaggggcgcagaggcccgcgccctggctggccctgtgcatgcgccttgcgccctgctcccaggtgccactaacccgtaatctggctctgtgtgcatgtgctgcccggcagggctgtcgtgtgcgtgttgggtgggaaggcggaggcggcgcggggcgggctggcctctgagcatctggctgcatttagcacg

SEQ ID NO: 125 - DNA, 503 bp, Artificial Sequence
  Synthetic
gagcctcctgcccctcaccaggccctgttagcatcacctcgggcacctggccacagcaggggccagtcagggcaccccgggatagcacgcccaggccctgtgcaaggcctctggcacttaggagaggcttttgcccctttgtcctctgagcagaagggttggcaaagagggaaggggacaggccagttctgcacctggcctttctccagaatgaaggcctccacctcccgtccgtccccacagaaagaaaagtaaactgttttcgcggctgcgcagaaagaagaacatggtaagtgcagtgagtgctgcggaggggcgcagaggcccgcgccctggctggccctgtgcatgcgccttgcgccctgctcccaggtgccactaacccgtaatctgctgctctgtgtgcagtgctgcccggcagggctgtcgtgtgcgtgttgggtgggaaggcggaggcggcgcggggcgggctggcctctgagcatctggctgcatttagcacg

SEQ ID NO: 126 - DNA, 504 bp, Artificial Sequence
  Synthetic
gagcctcctgcccctcaccaggccctgttagcatcacctcgggcacctggccacagcaggggccagtcagggcaccccgggatagcacgcccaggccctgtgcaaggcctctggcacttaggagaggcttttgcccctttgtcctctgagcagaagggttggcaaagagggaaggggacaggccagttctgcacctggcctttctccagaatgaaggcctccacctcccgtccgtccccacagaaagaaaagtaaactgttttcgcggctgcgcagaaagaagaacatggtaagtgcagtgagtgctgcggaggggcgcagaggcccgcgccctggctggccctgtgcatgcgccttgcgccctgctcccaggtgccactaacccgtaatctgctgctctgtgtgcatgtgctgcccggcagggctgtcgtgtgcgtgttgggtgggaaggcggaggcggcgcggggcgggctggcctctgagcatctggctgcatttagcacg

SEQ ID NO: 127 - DNA, 502 bp, Artificial Sequence
  Synthetic
gagcctcctgcccctcaccaggccctgttagcatcacctcgggcacctggccacagcaggggccagtcagggcaccccgggatagcacgcccaggccctgtgcaaggcctctggcacttaggagaggcttttgcccctttgtcctctgagcagaagggttggcaaagagggaaggggacaggccagttctgcacctggcctttctccagaatgaaggcctccacctcccgtccgtccccacagaaagaaaagtaaactgttttcgcggctgcgcagaaagaagaacatggtaagtgcagtgagtgctgcggaggggcgcagaggcccgcgccctggctggccctgtgcatgcgccttgcgccctgctcccaggtgctcactaacccgtaatctggctctgtgtgcagtgctgcccggcagggctgtcgtgtgcgtgttgggtgggaaggcggaggcggcgcggggcgggctggcctctgagcatctggctgcatttagcacg

SEQ ID NO: 128 - DNA, 503 bp, Artificial Sequence
  Synthetic
gagcctcctgcccctcaccaggccctgttagcatcacctcgggcacctggccacagcaggggccagtcagggcaccccgggatagcacgcccaggccctgtgcaaggcctctggcacttaggagaggcttttgcccctttgtcctctgagcagaagggttggcaaagagggaaggggacaggccagttctgcacctggcctttctccagaatgaaggcctccacctcccgtccgtccccacagaaagaaaagtaaactgttttcgcggctgcgcagaaagaagaacatggtaagtgcagtgagtgctgcggaggggcgcagaggcccgcgccctggctggccctgtgcatgcgccttgcgccctgctcccaggtgctcactaacccgtaatctggctctgtgtgcatgtgctgcccggcagggctgtcgtgtgcgtgttgggtgggaaggcggaggcggcgcggggcgggctggcctctgagcatctggctgcatttagcacg

SEQ ID NO: 129 - DNA, 504 bp, Artificial Sequence
  Synthetic
gagcctcctgcccctcaccaggccctgttagcatcacctcgggcacctggccacagcaggggccagtcagggcaccccgggatagcacgcccaggccctgtgcaaggcctctggcacttaggagaggcttttgcccctttgtcctctgagcagaagggttggcaaagagggaaggggacaggccagttctgcacctggcctttctccagaatgaaggcctccacctcccgtccgtccccacagaaagaaaagtaaactgttttcgcggctgcgcagaaagaagaacatggtaagtgcagtgagtgctgcggaggggcgcagaggcccgcgccctggctggccctgtgcatgcgccttgcgccctgctcccaggtgctcactaacccgtaatctgctgctctgtgtgcagtgctgcccggcagggctgtcgtgtgcgtgttgggtgggaaggcggaggcggcgcggggcgggctggcctctgagcatctggctgcatttagcacg

SEQ ID NO: 130 - DNA, 505 bp, Artificial Sequence
  Synthetic
gagcctcctgcccctcaccaggccctgttagcatcacctcgggcacctggccacagcaggggccagtcagggcaccccgggatagcacgcccaggccctgtgcaaggcctctggcacttaggagaggcttttgcccctttgtcctctgagcagaagggttggcaaagagggaaggggacaggccagttctgcacctggcctttctccagaatgaaggcctccacctcccgtccgtccccacagaaagaaaagtaaactgttttcgcggctgcgcagaaagaagaacatggtaagtgcagtgagtgctgcggaggggcgcagaggcccgcgccctggctggccctgtgcatgcgccttgcgccctgctcccaggtgctcactaacccgtaatctgctgctctgtgtgcatgtgctgcccggcagggctgtcgtgtgcgtgttgggtgggaaggcggaggcggcgcggggcgggctggcctctgagcatctggctgcatttagcacg

SEQ ID NO: 131 - DNA, 502 bp, Artificial Sequence
  Synthetic
gagcctcctgcccctcaccaggccctgttagcatcacctcgggcacctggccacagcaggggccagtcagggcaccccgggatagcacgcccaggccctgtgcaaggcctctggcacttaggagaggcttttgcccctttgtcctctgagcagaagggttggcaaagagggaaggggacaggccagttctgcacctggcctttctccagaatgaaggcctccacctcccgtccgtccccacagaaagaaaagtaaactgttttcgcggctgcgcagaaagaagaacatggtaagtgcagtgagtgctgcggaggggcgcagaggcccgcgccctggctggccctgtgcatgctgccttgcgccctgctcccaggtgccactaacccgtaatctggctctgtgtgcagtgctgcccggcagggctgtcgtgtgcgtgttgggtgggaaggcggaggcggcgcggggcgggctggcctctgagcatctggctgcatttagcacg

SEQ ID NO: 132 - DNA, 503 bp, Artificial Sequence
  Synthetic
gagcctcctgcccctcaccaggccctgttagcatcacctcgggcacctggccacagcaggggccagtcagggcaccccgggatagcacgcccaggccctgtgcaaggcctctggcacttaggagaggcttttgcccctttgtcctctgagcagaagggttggcaaagagggaaggggacaggccagttctgcacctggcctttctccagaatgaaggcctccacctcccgtccgtccccacagaaagaaaagtaaactgttttcgcggctgcgcagaaagaagaacatggtaagtgcagtgagtgctgcggaggggcgcagaggcccgcgccctggctggccctgtgcatgctgccttgcgccctgctcccaggtgccactaacccgtaatctggctctgtgtgcatgtgctgcccggcagggctgtcgtgtgcgtgttgggtgggaaggcggaggcggcgcggggcgggctggcctctgagcatctggctgcatttagcacg

SEQ ID NO: 133 - DNA, 504 bp, Artificial Sequence
  Synthetic
gagcctcctgcccctcaccaggccctgttagcatcacctcgggcacctggccacagcaggggccagtcagggcaccccgggatagcacgcccaggccctgtgcaaggcctctggcacttaggagaggcttttgcccctttgtcctctgagcagaagggttggcaaagagggaaggggacaggccagttctgcacctggcctttctccagaatgaaggcctccacctcccgtccgtccccacagaaagaaaagtaaactgttttcgcggctgcgcagaaagaagaacatggtaagtgcagtgagtgctgcggaggggcgcagaggcccgcgccctggctggccctgtgcatgctgccttgcgccctgctcccaggtgccactaacccgtaatctgctgctctgtgtgcagtgctgcccggcagggctgtcgtgtgcgtgttgggtgggaaggcggaggcggcgcggggcgggctggcctctgagcatctggctgcatttagcacg

SEQ ID NO: 134 - DNA, 505 bp, Artificial Sequence
  Synthetic
gagcctcctgcccctcaccaggccctgttagcatcacctcgggcacctggccacagcaggggccagtcagggcaccccgggatagcacgcccaggccctgtgcaaggcctctggcacttaggagaggcttttgcccctttgtcctctgagcagaagggttggcaaagagggaaggggacaggccagttctgcacctggcctttctccagaatgaaggcctccacctcccgtccgtccccacagaaagaaaagtaaactgttttcgcggctgcgcagaaagaagaacatggtaagtgcagtgagtgctgcggaggggcgcagaggcccgcgccctggctggccctgtgcatgctgccttgcgccctgctcccaggtgccactaacccgtaatctgctgctctgtgtgcatgtgctgcccggcagggctgtcgtgtgcgtgttgggtgggaaggcggaggcggcgcggggcgggctggcctctgagcatctggctgcatttagcacg

SEQ ID NO: 135 - DNA, 503 bp, Artificial Sequence
  Synthetic
gagcctcctgcccctcaccaggccctgttagcatcacctcgggcacctggccacagcaggggccagtcagggcaccccgggatagcacgcccaggccctgtgcaaggcctctggcacttaggagaggcttttgcccctttgtcctctgagcagaagggttggcaaagagggaaggggacaggccagttctgcacctggcctttctccagaatgaaggcctccacctcccgtccgtccccacagaaagaaaagtaaactgttttcgcggctgcgcagaaagaagaacatggtaagtgcagtgagtgctgcggaggggcgcagaggcccgcgccctggctggccctgtgcatgctgccttgcgccctgctcccaggtgctcactaacccgtaatctggctctgtgtgcagtgctgcccggcagggctgtcgtgtgcgtgttgggtgggaaggcggaggcggcgcggggcgggctggcctctgagcatctggctgcatttagcacg

SEQ ID NO: 136 - DNA, 504 bp, Artificial Sequence
  Synthetic
gagcctcctgcccctcaccaggccctgttagcatcacctcgggcacctggccacagcaggggccagtcagggcaccccgggatagcacgcccaggccctgtgcaaggcctctggcacttaggagaggcttttgcccctttgtcctctgagcagaagggttggcaaagagggaaggggacaggccagttctgcacctggcctttctccagaatgaaggcctccacctcccgtccgtccccacagaaagaaaagtaaactgttttcgcggctgcgcagaaagaagaacatggtaagtgcagtgagtgctgcggaggggcgcagaggcccgcgccctggctggccctgtgcatgctgccttgcgccctgctcccaggtgctcactaacccgtaatctggctctgtgtgcatgtgctgcccggcagggctgtcgtgtgcgtgttgggtgggaaggcggaggcggcgcggggcgggctggcctctgagcatctggctgcatttagcacg

SEQ ID NO: 137 - DNA, 505 bp, Artificial Sequence
  Synthetic
gagcctcctgcccctcaccaggccctgttagcatcacctcgggcacctggccacagcaggggccagtcagggcaccccgggatagcacgcccaggccctgtgcaaggcctctggcacttaggagaggcttttgcccctttgtcctctgagcagaagggttggcaaagagggaaggggacaggccagttctgcacctggcctttctccagaatgaaggcctccacctcccgtccgtccccacagaaagaaaagtaaactgttttcgcggctgcgcagaaagaagaacatggtaagtgcagtgagtgctgcggaggggcgcagaggcccgcgccctggctggccctgtgcatgctgccttgcgccctgctcccaggtgctcactaacccgtaatctgctgctctgtgtgcagtgctgcccggcagggctgtcgtgtgcgtgttgggtgggaaggcggaggcggcgcggggcgggctggcctctgagcatctggctgcatttagcacg

SEQ ID NO: 138 - DNA, 506 bp, Artificial Sequence
  Synthetic
gagcctcctgcccctcaccaggccctgttagcatcacctcgggcacctggccacagcaggggccagtcagggcaccccgggatagcacgcccaggccctgtgcaaggcctctggcacttaggagaggcttttgcccctttgtcctctgagcagaagggttggcaaagagggaaggggacaggccagttctgcacctggcctttctccagaatgaaggcctccacctcccgtccgtccccacagaaagaaaagtaaactgttttcgcggctgcgcagaaagaagaacatggtaagtgcagtgagtgctgcggaggggcgcagaggcccgcgccctggctggccctgtgcatgctgccttgcgccctgctcccaggtgctcactaacccgtaatctgctgctctgtgtgcatgtgctgcccggcagggctgtcgtgtgcgtgttgggtgggaaggcggaggcggcgcggggcgggctggcctctgagcatctggctgcatttagcacg

SEQ ID NO: 139 - DNA, 501 bp, Artificial Sequence
  Synthetic
gagcctcctgcccctcaccaggccctgttagcatcacctcgggcacctggccacagcaggggccagtcagggcaccccgggatagcacgcccaggccctgtgcaaggcctctggcacttaggagaggcttttgcccctttgtcctctgagcagaagggttggcaaagagggaaggggacaggccagttctgcacctggcctttctccagaatgaaggcctccacctcccgtccgtccccacagaaagaaaagtaaactgttttcgcggctgcgcagaaagaagaacatggtaggtgcagtgagtgctgcggaggggcgcagaggcccgcgccctggctggccctgtgcatgcgccttgcgccctgctcccaggtgccactaacccgtaatctggctctgtgtgcagtgctgcccggcagggctgtcgtgtgcgtgttgggtgggaaggcggaggcggcgcggggcgggctggcctctgagcatctggctgcatttagcacg

SEQ ID NO: 140 - DNA, 502 bp, Artificial Sequence
  Synthetic
gagcctcctgcccctcaccaggccctgttagcatcacctcgggcacctggccacagcaggggccagtcagggcaccccgggatagcacgcccaggccctgtgcaaggcctctggcacttaggagaggcttttgcccctttgtcctctgagcagaagggttggcaaagagggaaggggacaggccagttctgcacctggcctttctccagaatgaaggcctccacctcccgtccgtccccacagaaagaaaagtaaactgttttcgcggctgcgcagaaagaagaacatggtaggtgcagtgagtgctgcggaggggcgcagaggcccgcgccctggctggccctgtgcatgcgccttgcgccctgctcccaggtgccactaacccgtaatctggctctgtgtgcatgtgctgcccggcagggctgtcgtgtgcgtgttgggtgggaaggcggaggcggcgcggggcgggctggcctctgagcatctggctgcatttagcacg

SEQ ID NO: 141 - DNA, 503 bp, Artificial Sequence
  Synthetic
gagcctcctgcccctcaccaggccctgttagcatcacctcgggcacctggccacagcaggggccagtcagggcaccccgggatagcacgcccaggccctgtgcaaggcctctggcacttaggagaggcttttgcccctttgtcctctgagcagaagggttggcaaagagggaaggggacaggccagttctgcacctggcctttctccagaatgaaggcctccacctcccgtccgtccccacagaaagaaaagtaaactgttttcgcggctgcgcagaaagaagaacatggtaggtgcagtgagtgctgcggaggggcgcagaggcccgcgccctggctggccctgtgcatgcgccttgcgccctgctcccaggtgccactaacccgtaatctgctgctctgtgtgcagtgctgcccggcagggctgtcgtgtgcgtgttgggtgggaaggcggaggcggcgcggggcgggctggcctctgagcatctggctgcatttagcacg

SEQ ID NO: 142 - DNA, 504 bp, Artificial Sequence
  Synthetic
gagcctcctgcccctcaccaggccctgttagcatcacctcgggcacctggccacagcaggggccagtcagggcaccccgggatagcacgcccaggccctgtgcaaggcctctggcacttaggagaggcttttgcccctttgtcctctgagcagaagggttggcaaagagggaaggggacaggccagttctgcacctggcctttctccagaatgaaggcctccacctcccgtccgtccccacagaaagaaaagtaaactgttttcgcggctgcgcagaaagaagaacatggtaggtgcagtgagtgctgcggaggggcgcagaggcccgcgccctggctggccctgtgcatgcgccttgcgccctgctcccaggtgccactaacccgtaatctgctgctctgtgtgcatgtgctgcccggcagggctgtcgtgtgcgtgttgggtgggaaggcggaggcggcgcggggcgggctggcctctgagcatctggctgcatttagcacg

SEQ ID NO: 143 - DNA, 502 bp, Artificial Sequence
  Synthetic
gagcctcctgcccctcaccaggccctgttagcatcacctcgggcacctggccacagcaggggccagtcagggcaccccgggatagcacgcccaggccctgtgcaaggcctctggcacttaggagaggcttttgcccctttgtcctctgagcagaagggttggcaaagagggaaggggacaggccagttctgcacctggcctttctccagaatgaaggcctccacctcccgtccgtccccacagaaagaaaagtaaactgttttcgcggctgcgcagaaagaagaacatggtaggtgcagtgagtgctgcggaggggcgcagaggcccgcgccctggctggccctgtgcatgcgccttgcgccctgctcccaggtgctcactaacccgtaatctggctctgtgtgcagtgctgcccggcagggctgtcgtgtgcgtgttgggtgggaaggcggaggcggcgcggggcgggctggcctctgagcatctggctgcatttagcacg

SEQ ID NO: 144 - DNA, 503 bp, Artificial Sequence
  Synthetic
gagcctcctgcccctcaccaggccctgttagcatcacctcgggcacctggccacagcaggggccagtcagggcaccccgggatagcacgcccaggccctgtgcaaggcctctggcacttaggagaggcttttgcccctttgtcctctgagcagaagggttggcaaagagggaaggggacaggccagttctgcacctggcctttctccagaatgaaggcctccacctcccgtccgtccccacagaaagaaaagtaaactgttttcgcggctgcgcagaaagaagaacatggtaggtgcagtgagtgctgcggaggggcgcagaggcccgcgccctggctggccctgtgcatgcgccttgcgccctgctcccaggtgctcactaacccgtaatctggctctgtgtgcatgtgctgcccggcagggctgtcgtgtgcgtgttgggtgggaaggcggaggcggcgcggggcgggctggcctctgagcatctggctgcatttagcacg

SEQ ID NO: 145 - DNA, 504 bp, Artificial Sequence
  Synthetic
gagcctcctgcccctcaccaggccctgttagcatcacctcgggcacctggccacagcaggggccagtcagggcaccccgggatagcacgcccaggccctgtgcaaggcctctggcacttaggagaggcttttgcccctttgtcctctgagcagaagggttggcaaagagggaaggggacaggccagttctgcacctggcctttctccagaatgaaggcctccacctcccgtccgtccccacagaaagaaaagtaaactgttttcgcggctgcgcagaaagaagaacatggtaggtgcagtgagtgctgcggaggggcgcagaggcccgcgccctggctggccctgtgcatgcgccttgcgccctgctcccaggtgctcactaacccgtaatctgctgctctgtgtgcagtgctgcccggcagggctgtcgtgtgcgtgttgggtgggaaggcggaggcggcgcggggcgggctggcctctgagcatctggctgcatttagcacg

SEQ ID NO: 146 - DNA, 505 bp, Artificial Sequence
  Synthetic
gagcctcctgcccctcaccaggccctgttagcatcacctcgggcacctggccacagcaggggccagtcagggcaccccgggatagcacgcccaggccctgtgcaaggcctctggcacttaggagaggcttttgcccctttgtcctctgagcagaagggttggcaaagagggaaggggacaggccagttctgcacctggcctttctccagaatgaaggcctccacctcccgtccgtccccacagaaagaaaagtaaactgttttcgcggctgcgcagaaagaagaacatggtaggtgcagtgagtgctgcggaggggcgcagaggcccgcgccctggctggccctgtgcatgcgccttgcgccctgctcccaggtgctcactaacccgtaatctgctgctctgtgtgcatgtgctgcccggcagggctgtcgtgtgcgtgttgggtgggaaggcggaggcggcgcggggcgggctggcctctgagcatctggctgcatttagcacg

SEQ ID NO: 147 - DNA, 502 bp, Artificial Sequence
  Synthetic
gagcctcctgcccctcaccaggccctgttagcatcacctcgggcacctggccacagcaggggccagtcagggcaccccgggatagcacgcccaggccctgtgcaaggcctctggcacttaggagaggcttttgcccctttgtcctctgagcagaagggttggcaaagagggaaggggacaggccagttctgcacctggcctttctccagaatgaaggcctccacctcccgtccgtccccacagaaagaaaagtaaactgttttcgcggctgcgcagaaagaagaacatggtaggtgcagtgagtgctgcggaggggcgcagaggcccgcgccctggctggccctgtgcatgctgccttgcgccctgctcccaggtgccactaacccgtaatctggctctgtgtgcagtgctgcccggcagggctgtcgtgtgcgtgttgggtgggaaggcggaggcggcgcggggcgggctggcctctgagcatctggctgcatttagcacg

SEQ ID NO: 148 - DNA, 503 bp, Artificial Sequence
  Synthetic
gagcctcctgcccctcaccaggccctgttagcatcacctcgggcacctggccacagcaggggccagtcagggcaccccgggatagcacgcccaggccctgtgcaaggcctctggcacttaggagaggcttttgcccctttgtcctctgagcagaagggttggcaaagagggaaggggacaggccagttctgcacctggcctttctccagaatgaaggcctccacctcccgtccgtccccacagaaagaaaagtaaactgttttcgcggctgcgcagaaagaagaacatggtaggtgcagtgagtgctgcggaggggcgcagaggcccgcgccctggctggccctgtgcatgctgccttgcgccctgctcccaggtgccactaacccgtaatctggctctgtgtgcatgtgctgcccggcagggctgtcgtgtgcgtgttgggtgggaaggcggaggcggcgcggggcgggctggcctctgagcatctggctgcatttagcacg

SEQ ID NO: 149 - DNA, 504 bp, Artificial Sequence
  Synthetic
gagcctcctgcccctcaccaggccctgttagcatcacctcgggcacctggccacagcaggggccagtcagggcaccccgggatagcacgcccaggccctgtgcaaggcctctggcacttaggagaggcttttgcccctttgtcctctgagcagaagggttggcaaagagggaaggggacaggccagttctgcacctggcctttctccagaatgaaggcctccacctcccgtccgtccccacagaaagaaaagtaaactgttttcgcggctgcgcagaaagaagaacatggtaggtgcagtgagtgctgcggaggggcgcagaggcccgcgccctggctggccctgtgcatgctgccttgcgccctgctcccaggtgccactaacccgtaatctgctgctctgtgtgcagtgctgcccggcagggctgtcgtgtgcgtgttgggtgggaaggcggaggcggcgcggggcgggctggcctctgagcatctggctgcatttagcacg

SEQ ID NO: 150 - DNA, 505 bp, Artificial Sequence
  Synthetic
gagcctcctgcccctcaccaggccctgttagcatcacctcgggcacctggccacagcaggggccagtcagggcaccccgggatagcacgcccaggccctgtgcaaggcctctggcacttaggagaggcttttgcccctttgtcctctgagcagaagggttggcaaagagggaaggggacaggccagttctgcacctggcctttctccagaatgaaggcctccacctcccgtccgtccccacagaaagaaaagtaaactgttttcgcggctgcgcagaaagaagaacatggtaggtgcagtgagtgctgcggaggggcgcagaggcccgcgccctggctggccctgtgcatgctgccttgcgccctgctcccaggtgccactaacccgtaatctgctgctctgtgtgcatgtgctgcccggcagggctgtcgtgtgcgtgttgggtgggaaggcggaggcggcgcggggcgggctggcctctgagcatctggctgcatttagcacg

SEQ ID NO: 151 - DNA, 503 bp, Artificial Sequence
  Synthetic
gagcctcctgcccctcaccaggccctgttagcatcacctcgggcacctggccacagcaggggccagtcagggcaccccgggatagcacgcccaggccctgtgcaaggcctctggcacttaggagaggcttttgcccctttgtcctctgagcagaagggttggcaaagagggaaggggacaggccagttctgcacctggcctttctccagaatgaaggcctccacctcccgtccgtccccacagaaagaaaagtaaactgttttcgcggctgcgcagaaagaagaacatggtaggtgcagtgagtgctgcggaggggcgcagaggcccgcgccctggctggccctgtgcatgctgccttgcgccctgctcccaggtgctcactaacccgtaatctggctctgtgtgcagtgctgcccggcagggctgtcgtgtgcgtgttgggtgggaaggcggaggcggcgcggggcgggctggcctctgagcatctggctgcatttagcacg

SEQ ID NO: 152 - DNA, 504 bp, Artificial Sequence
  Synthetic
gagcctcctgcccctcaccaggccctgttagcatcacctcgggcacctggccacagcaggggccagtcagggcaccccgggatagcacgcccaggccctgtgcaaggcctctggcacttaggagaggcttttgcccctttgtcctctgagcagaagggttggcaaagagggaaggggacaggccagttctgcacctggcctttctccagaatgaaggcctccacctcccgtccgtccccacagaaagaaaagtaaactgttttcgcggctgcgcagaaagaagaacatggtaggtgcagtgagtgctgcggaggggcgcagaggcccgcgccctggctggccctgtgcatgctgccttgcgccctgctcccaggtgctcactaacccgtaatctggctctgtgtgcatgtgctgcccggcagggctgtcgtgtgcgtgttgggtgggaaggcggaggcggcgcggggcgggctggcctctgagcatctggctgcatttagcacg

SEQ ID NO: 153 - DNA, 505 bp, Artificial Sequence
  Synthetic
gagcctcctgcccctcaccaggccctgttagcatcacctcgggcacctggccacagcaggggccagtcagggcaccccgggatagcacgcccaggccctgtgcaaggcctctggcacttaggagaggcttttgcccctttgtcctctgagcagaagggttggcaaagagggaaggggacaggccagttctgcacctggcctttctccagaatgaaggcctccacctcccgtccgtccccacagaaagaaaagtaaactgttttcgcggctgcgcagaaagaagaacatggtaggtgcagtgagtgctgcggaggggcgcagaggcccgcgccctggctggccctgtgcatgctgccttgcgccctgctcccaggtgctcactaacccgtaatctgctgctctgtgtgcagtgctgcccggcagggctgtcgtgtgcgtgttgggtgggaaggcggaggcggcgcggggcgggctggcctctgagcatctggctgcatttagcacg

SEQ ID NO: 154 - DNA, 506 bp, Artificial Sequence
  Synthetic
gagcctcctgcccctcaccaggccctgttagcatcacctcgggcacctggccacagcaggggccagtcagggcaccccgggatagcacgcccaggccctgtgcaaggcctctggcacttaggagaggcttttgcccctttgtcctctgagcagaagggttggcaaagagggaaggggacaggccagttctgcacctggcctttctccagaatgaaggcctccacctcccgtccgtccccacagaaagaaaagtaaactgttttcgcggctgcgcagaaagaagaacatggtaggtgcagtgagtgctgcggaggggcgcagaggcccgcgccctggctggccctgtgcatgctgccttgcgccctgctcccaggtgctcactaacccgtaatctgctgctctgtgtgcatgtgctgcccggcagggctgtcgtgtgcgtgttgggtgggaaggcggaggcggcgcggggcgggctggcctctgagcatctggctgcatttagcacg

SEQ ID NO: 155 - DNA, 501 bp, Artificial Sequence
  Synthetic
gagcctcctgcccctcaccaggccctgttagcatcacctcgggcacctggccacagcaggggccagtcagggcaccccgggatagcacgcccaggccctgtgcaaggcctctggcacttaggagaggcttttgcccctttgtcctctgagcagaagggttggcaaagagggaaggggacaggccagttctgcacctggcctttctccagaatgaaggcctccacctcccgtccgtccccacagaaagaaaagtaaactgttttcgcggctgcgcagaaagaagaacatggtatgtgcagtgagtgctgcggaggggcgcagaggcccgcgccctggctggccctgtgcatgcgccttgcgccctgctcccaggtgccactaacccgtaatctggctctgtgtgcagtgctgcccggcagggctgtcgtgtgcgtgttgggtgggaaggcggaggcggcgcggggcgggctggcctctgagcatctggctgcatttagcacg

SEQ ID NO: 156 - DNA, 502 bp, Artificial Sequence
  Synthetic
gagcctcctgcccctcaccaggccctgttagcatcacctcgggcacctggccacagcaggggccagtcagggcaccccgggatagcacgcccaggccctgtgcaaggcctctggcacttaggagaggcttttgcccctttgtcctctgagcagaagggttggcaaagagggaaggggacaggccagttctgcacctggcctttctccagaatgaaggcctccacctcccgtccgtccccacagaaagaaaagtaaactgttttcgcggctgcgcagaaagaagaacatggtatgtgcagtgagtgctgcggaggggcgcagaggcccgcgccctggctggccctgtgcatgcgccttgcgccctgctcccaggtgccactaacccgtaatctggctctgtgtgcatgtgctgcccggcagggctgtcgtgtgcgtgttgggtgggaaggcggaggcggcgcggggcgggctggcctctgagcatctggctgcatttagcacg

SEQ ID NO: 157 - DNA, 503 bp, Artificial Sequence
  Synthetic
gagcctcctgcccctcaccaggccctgttagcatcacctcgggcacctggccacagcaggggccagtcagggcaccccgggatagcacgcccaggccctgtgcaaggcctctggcacttaggagaggcttttgcccctttgtcctctgagcagaagggttggcaaagagggaaggggacaggccagttctgcacctggcctttctccagaatgaaggcctccacctcccgtccgtccccacagaaagaaaagtaaactgttttcgcggctgcgcagaaagaagaacatggtatgtgcagtgagtgctgcggaggggcgcagaggcccgcgccctggctggccctgtgcatgcgccttgcgccctgctcccaggtgccactaacccgtaatctgctgctctgtgtgcagtgctgcccggcagggctgtcgtgtgcgtgttgggtgggaaggcggaggcggcgcggggcgggctggcctctgagcatctggctgcatttagcacg

SEQ ID NO: 158 - DNA, 504 bp, Artificial Sequence
  Synthetic
gagcctcctgcccctcaccaggccctgttagcatcacctcgggcacctggccacagcaggggccagtcagggcaccccgggatagcacgcccaggccctgtgcaaggcctctggcacttaggagaggcttttgcccctttgtcctctgagcagaagggttggcaaagagggaaggggacaggccagttctgcacctggcctttctccagaatgaaggcctccacctcccgtccgtccccacagaaagaaaagtaaactgttttcgcggctgcgcagaaagaagaacatggtatgtgcagtgagtgctgcggaggggcgcagaggcccgcgccctggctggccctgtgcatgcgccttgcgccctgctcccaggtgccactaacccgtaatctgctgctctgtgtgcatgtgctgcccggcagggctgtcgtgtgcgtgttgggtgggaaggcggaggcggcgcggggcgggctggcctctgagcatctggctgcatttagcacg

SEQ ID NO: 159 - DNA, 502 bp, Artificial Sequence
  Synthetic
gagcctcctgcccctcaccaggccctgttagcatcacctcgggcacctggccacagcaggggccagtcagggcaccccgggatagcacgcccaggccctgtgcaaggcctctggcacttaggagaggcttttgcccctttgtcctctgagcagaagggttggcaaagagggaaggggacaggccagttctgcacctggcctttctccagaatgaaggcctccacctcccgtccgtccccacagaaagaaaagtaaactgttttcgcggctgcgcagaaagaagaacatggtatgtgcagtgagtgctgcggaggggcgcagaggcccgcgccctggctggccctgtgcatgcgccttgcgccctgctcccaggtgctcactaacccgtaatctggctctgtgtgcagtgctgcccggcagggctgtcgtgtgcgtgttgggtgggaaggcggaggcggcgcggggcgggctggcctctgagcatctggctgcatttagcacg

SEQ ID NO: 160 - DNA, 503 bp, Artificial Sequence
  Synthetic
gagcctcctgcccctcaccaggccctgttagcatcacctcgggcacctggccacagcaggggccagtcagggcaccccgggatagcacgcccaggccctgtgcaaggcctctggcacttaggagaggcttttgcccctttgtcctctgagcagaagggttggcaaagagggaaggggacaggccagttctgcacctggcctttctccagaatgaaggcctccacctcccgtccgtccccacagaaagaaaagtaaactgttttcgcggctgcgcagaaagaagaacatggtatgtgcagtgagtgctgcggaggggcgcagaggcccgcgccctggctggccctgtgcatgcgccttgcgccctgctcccaggtgctcactaacccgtaatctggctctgtgtgcatgtgctgcccggcagggctgtcgtgtgcgtgttgggtgggaaggcggaggcggcgcggggcgggctggcctctgagcatctggctgcatttagcacg

SEQ ID NO: 161 - DNA, 504 bp, Artificial Sequence
  Synthetic
gagcctcctgcccctcaccaggccctgttagcatcacctcgggcacctggccacagcaggggccagtcagggcaccccgggatagcacgcccaggccctgtgcaaggcctctggcacttaggagaggcttttgcccctttgtcctctgagcagaagggttggcaaagagggaaggggacaggccagttctgcacctggcctttctccagaatgaaggcctccacctcccgtccgtccccacagaaagaaaagtaaactgttttcgcggctgcgcagaaagaagaacatggtatgtgcagtgagtgctgcggaggggcgcagaggcccgcgccctggctggccctgtgcatgcgccttgcgccctgctcccaggtgctcactaacccgtaatctgctgctctgtgtgcagtgctgcccggcagggctgtcgtgtgcgtgttgggtgggaaggcggaggcggcgcggggcgggctggcctctgagcatctggctgcatttagcacg

SEQ ID NO: 162 - DNA, 505 bp, Artificial Sequence
  Synthetic
gagcctcctgcccctcaccaggccctgttagcatcacctcgggcacctggccacagcaggggccagtcagggcaccccgggatagcacgcccaggccctgtgcaaggcctctggcacttaggagaggcttttgcccctttgtcctctgagcagaagggttggcaaagagggaaggggacaggccagttctgcacctggcctttctccagaatgaaggcctccacctcccgtccgtccccacagaaagaaaagtaaactgttttcgcggctgcgcagaaagaagaacatggtatgtgcagtgagtgctgcggaggggcgcagaggcccgcgccctggctggccctgtgcatgcgccttgcgccctgctcccaggtgctcactaacccgtaatctgctgctctgtgtgcatgtgctgcccggcagggctgtcgtgtgcgtgttgggtgggaaggcggaggcggcgcggggcgggctggcctctgagcatctggctgcatttagcacg

SEQ ID NO: 163 - DNA, 502 bp, Artificial Sequence
  Synthetic
gagcctcctgcccctcaccaggccctgttagcatcacctcgggcacctggccacagcaggggccagtcagggcaccccgggatagcacgcccaggccctgtgcaaggcctctggcacttaggagaggcttttgcccctttgtcctctgagcagaagggttggcaaagagggaaggggacaggccagttctgcacctggcctttctccagaatgaaggcctccacctcccgtccgtccccacagaaagaaaagtaaactgttttcgcggctgcgcagaaagaagaacatggtatgtgcagtgagtgctgcggaggggcgcagaggcccgcgccctggctggccctgtgcatgctgccttgcgccctgctcccaggtgccactaacccgtaatctggctctgtgtgcagtgctgcccggcagggctgtcgtgtgcgtgttgggtgggaaggcggaggcggcgcggggcgggctggcctctgagcatctggctgcatttagcacg

SEQ ID NO: 164 - DNA, 503 bp, Artificial Sequence
  Synthetic
gagcctcctgcccctcaccaggccctgttagcatcacctcgggcacctggccacagcaggggccagtcagggcaccccgggatagcacgcccaggccctgtgcaaggcctctggcacttaggagaggcttttgcccctttgtcctctgagcagaagggttggcaaagagggaaggggacaggccagttctgcacctggcctttctccagaatgaaggcctccacctcccgtccgtccccacagaaagaaaagtaaactgttttcgcggctgcgcagaaagaagaacatggtatgtgcagtgagtgctgcggaggggcgcagaggcccgcgccctggctggccctgtgcatgctgccttgcgccctgctcccaggtgccactaacccgtaatctggctctgtgtgcatgtgctgcccggcagggctgtcgtgtgcgtgttgggtgggaaggcggaggcggcgcggggcgggctggcctctgagcatctggctgcatttagcacg

SEQ ID NO: 165 - DNA, 504 bp, Artificial Sequence
  Synthetic
gagcctcctgcccctcaccaggccctgttagcatcacctcgggcacctggccacagcaggggccagtcagggcaccccgggatagcacgcccaggccctgtgcaaggcctctggcacttaggagaggcttttgcccctttgtcctctgagcagaagggttggcaaagagggaaggggacaggccagttctgcacctggcctttctccagaatgaaggcctccacctcccgtccgtccccacagaaagaaaagtaaactgttttcgcggctgcgcagaaagaagaacatggtatgtgcagtgagtgctgcggaggggcgcagaggcccgcgccctggctggccctgtgcatgctgccttgcgccctgctcccaggtgccactaacccgtaatctgctgctctgtgtgcagtgctgcccggcagggctgtcgtgtgcgtgttgggtgggaaggcggaggcggcgcggggcgggctggcctctgagcatctggctgcatttagcacg

SEQ ID NO: 166 - DNA, 505 bp, Artificial Sequence
  Synthetic
gagcctcctgcccctcaccaggccctgttagcatcacctcgggcacctggccacagcaggggccagtcagggcaccccgggatagcacgcccaggccctgtgcaaggcctctggcacttaggagaggcttttgcccctttgtcctctgagcagaagggttggcaaagagggaaggggacaggccagttctgcacctggcctttctccagaatgaaggcctccacctcccgtccgtccccacagaaagaaaagtaaactgttttcgcggctgcgcagaaagaagaacatggtatgtgcagtgagtgctgcggaggggcgcagaggcccgcgccctggctggccctgtgcatgctgccttgcgccctgctcccaggtgccactaacccgtaatctgctgctctgtgtgcatgtgctgcccggcagggctgtcgtgtgcgtgttgggtgggaaggcggaggcggcgcggggcgggctggcctctgagcatctggctgcatttagcacg

SEQ ID NO: 167 - DNA, 503 bp, Artificial Sequence
  Synthetic
gagcctcctgcccctcaccaggccctgttagcatcacctcgggcacctggccacagcaggggccagtcagggcaccccgggatagcacgcccaggccctgtgcaaggcctctggcacttaggagaggcttttgcccctttgtcctctgagcagaagggttggcaaagagggaaggggacaggccagttctgcacctggcctttctccagaatgaaggcctccacctcccgtccgtccccacagaaagaaaagtaaactgttttcgcggctgcgcagaaagaagaacatggtatgtgcagtgagtgctgcggaggggcgcagaggcccgcgccctggctggccctgtgcatgctgccttgcgccctgctcccaggtgctcactaacccgtaatctggctctgtgtgcagtgctgcccggcagggctgtcgtgtgcgtgttgggtgggaaggcggaggcggcgcggggcgggctggcctctgagcatctggctgcatttagcacg

SEQ ID NO: 168 - DNA, 504 bp, Artificial Sequence
  Synthetic
gagcctcctgcccctcaccaggccctgttagcatcacctcgggcacctggccacagcaggggccagtcagggcaccccgggatagcacgcccaggccctgtgcaaggcctctggcacttaggagaggcttttgcccctttgtcctctgagcagaagggttggcaaagagggaaggggacaggccagttctgcacctggcctttctccagaatgaaggcctccacctcccgtccgtccccacagaaagaaaagtaaactgttttcgcggctgcgcagaaagaagaacatggtatgtgcagtgagtgctgcggaggggcgcagaggcccgcgccctggctggccctgtgcatgctgccttgcgccctgctcccaggtgctcactaacccgtaatctggctctgtgtgcatgtgctgcccggcagggctgtcgtgtgcgtgttgggtgggaaggcggaggcggcgcggggcgggctggcctctgagcatctggctgcatttagcacg

SEQ ID NO: 169 - DNA, 505 bp, Artificial Sequence
  Synthetic
gagcctcctgcccctcaccaggccctgttagcatcacctcgggcacctggccacagcaggggccagtcagggcaccccgggatagcacgcccaggccctgtgcaaggcctctggcacttaggagaggcttttgcccctttgtcctctgagcagaagggttggcaaagagggaaggggacaggccagttctgcacctggcctttctccagaatgaaggcctccacctcccgtccgtccccacagaaagaaaagtaaactgttttcgcggctgcgcagaaagaagaacatggtatgtgcagtgagtgctgcggaggggcgcagaggcccgcgccctggctggccctgtgcatgctgccttgcgccctgctcccaggtgctcactaacccgtaatctgctgctctgtgtgcagtgctgcccggcagggctgtcgtgtgcgtgttgggtgggaaggcggaggcggcgcggggcgggctggcctctgagcatctggctgcatttagcacg

SEQ ID NO: 170 - DNA, 506 bp, Artificial Sequence
  Synthetic
gagcctcctgcccctcaccaggccctgttagcatcacctcgggcacctggccacagcaggggccagtcagggcaccccgggatagcacgcccaggccctgtgcaaggcctctggcacttaggagaggcttttgcccctttgtcctctgagcagaagggttggcaaagagggaaggggacaggccagttctgcacctggcctttctccagaatgaaggcctccacctcccgtccgtccccacagaaagaaaagtaaactgttttcgcggctgcgcagaaagaagaacatggtatgtgcagtgagtgctgcggaggggcgcagaggcccgcgccctggctggccctgtgcatgctgccttgcgccctgctcccaggtgctcactaacccgtaatctgctgctctgtgtgcatgtgctgcccggcagggctgtcgtgtgcgtgttgggtgggaaggcggaggcggcgcggggcgggctggcctctgagcatctggctgcatttagcacg

SEQ ID NO: 171 - DNA, 501 bp, Artificial Sequence
  Synthetic
gagcctcctgcccctcaccaggccctgttagcatcacctcgggcacctggccacagcaggggccagtcagggcaccccgggatagcacgcccaggccctgtgcaaggcctctggcacttaggagaggcttttgcccctttgtcctctgagcagaagggttggcaaagagggaaggggacaggccagttctgcacctggcctttctccagaatgaaggcctccacctcccgtccgtccccacagaaagaaaagtaaactgttttcgcggctgcgcagaaagaagaacatggtacgagcagtgagtgctgcggaggggcgcagaggcccgcgccctggctggccctgtgcatgcgccttgcgccctgctcccaggtgccactaacccgtaatctggctctgtgtgcagtgctgcccggcagggctgtcgtgtgcgtgttgggtgggaaggcggaggcggcgcggggcgggctggcctctgagcatctggctgcatttagcacg

SEQ ID NO: 172 - DNA, 502 bp, Artificial Sequence
  Synthetic
gagcctcctgcccctcaccaggccctgttagcatcacctcgggcacctggccacagcaggggccagtcagggcaccccgggatagcacgcccaggccctgtgcaaggcctctggcacttaggagaggcttttgcccctttgtcctctgagcagaagggttggcaaagagggaaggggacaggccagttctgcacctggcctttctccagaatgaaggcctccacctcccgtccgtccccacagaaagaaaagtaaactgttttcgcggctgcgcagaaagaagaacatggtacgagcagtgagtgctgcggaggggcgcagaggcccgcgccctggctggccctgtgcatgcgccttgcgccctgctcccaggtgccactaacccgtaatctggctctgtgtgcatgtgctgcccggcagggctgtcgtgtgcgtgttgggtgggaaggcggaggcggcgcggggcgggctggcctctgagcatctggctgcatttagcacg

SEQ ID NO: 173 - DNA, 503 bp, Artificial Sequence
  Synthetic
gagcctcctgcccctcaccaggccctgttagcatcacctcgggcacctggccacagcaggggccagtcagggcaccccgggatagcacgcccaggccctgtgcaaggcctctggcacttaggagaggcttttgcccctttgtcctctgagcagaagggttggcaaagagggaaggggacaggccagttctgcacctggcctttctccagaatgaaggcctccacctcccgtccgtccccacagaaagaaaagtaaactgttttcgcggctgcgcagaaagaagaacatggtacgagcagtgagtgctgcggaggggcgcagaggcccgcgccctggctggccctgtgcatgcgccttgcgccctgctcccaggtgccactaacccgtaatctgctgctctgtgtgcagtgctgcccggcagggctgtcgtgtgcgtgttgggtgggaaggcggaggcggcgcggggcgggctggcctctgagcatctggctgcatttagcacg

SEQ ID NO: 174 - DNA, 504 bp, Artificial Sequence
  Synthetic
gagcctcctgcccctcaccaggccctgttagcatcacctcgggcacctggccacagcaggggccagtcagggcaccccgggatagcacgcccaggccctgtgcaaggcctctggcacttaggagaggcttttgcccctttgtcctctgagcagaagggttggcaaagagggaaggggacaggccagttctgcacctggcctttctccagaatgaaggcctccacctcccgtccgtccccacagaaagaaaagtaaactgttttcgcggctgcgcagaaagaagaacatggtacgagcagtgagtgctgcggaggggcgcagaggcccgcgccctggctggccctgtgcatgcgccttgcgccctgctcccaggtgccactaacccgtaatctgctgctctgtgtgcatgtgctgcccggcagggctgtcgtgtgcgtgttgggtgggaaggcggaggcggcgcggggcgggctggcctctgagcatctggctgcatttagcacg

SEQ ID NO: 175 - DNA, 502 bp, Artificial Sequence
  Synthetic
gagcctcctgcccctcaccaggccctgttagcatcacctcgggcacctggccacagcaggggccagtcagggcaccccgggatagcacgcccaggccctgtgcaaggcctctggcacttaggagaggcttttgcccctttgtcctctgagcagaagggttggcaaagagggaaggggacaggccagttctgcacctggcctttctccagaatgaaggcctccacctcccgtccgtccccacagaaagaaaagtaaactgttttcgcggctgcgcagaaagaagaacatggtacgagcagtgagtgctgcggaggggcgcagaggcccgcgccctggctggccctgtgcatgcgccttgcgccctgctcccaggtgctcactaacccgtaatctggctctgtgtgcagtgctgcccggcagggctgtcgtgtgcgtgttgggtgggaaggcggaggcggcgcggggcgggctggcctctgagcatctggctgcatttagcacg

SEQ ID NO: 176 - DNA, 503 bp, Artificial Sequence
  Synthetic
gagcctcctgcccctcaccaggccctgttagcatcacctcgggcacctggccacagcaggggccagtcagggcaccccgggatagcacgcccaggccctgtgcaaggcctctggcacttaggagaggcttttgcccctttgtcctctgagcagaagggttggcaaagagggaaggggacaggccagttctgcacctggcctttctccagaatgaaggcctccacctcccgtccgtccccacagaaagaaaagtaaactgttttcgcggctgcgcagaaagaagaacatggtacgagcagtgagtgctgcggaggggcgcagaggcccgcgccctggctggccctgtgcatgcgccttgcgccctgctcccaggtgctcactaacccgtaatctggctctgtgtgcatgtgctgcccggcagggctgtcgtgtgcgtgttgggtgggaaggcggaggcggcgcggggcgggctggcctctgagcatctggctgcatttagcacg

SEQ ID NO: 177 - DNA, 504 bp, Artificial Sequence
  Synthetic
gagcctcctgcccctcaccaggccctgttagcatcacctcgggcacctggccacagcaggggccagtcagggcaccccgggatagcacgcccaggccctgtgcaaggcctctggcacttaggagaggcttttgcccctttgtcctctgagcagaagggttggcaaagagggaaggggacaggccagttctgcacctggcctttctccagaatgaaggcctccacctcccgtccgtccccacagaaagaaaagtaaactgttttcgcggctgcgcagaaagaagaacatggtacgagcagtgagtgctgcggaggggcgcagaggcccgcgccctggctggccctgtgcatgcgccttgcgccctgctcccaggtgctcactaacccgtaatctgctgctctgtgtgcagtgctgcccggcagggctgtcgtgtgcgtgttgggtgggaaggcggaggcggcgcggggcgggctggcctctgagcatctggctgcatttagcacg

SEQ ID NO: 178 - DNA, 505 bp, Artificial Sequence
  Synthetic
gagcctcctgcccctcaccaggccctgttagcatcacctcgggcacctggccacagcaggggccagtcagggcaccccgggatagcacgcccaggccctgtgcaaggcctctggcacttaggagaggcttttgcccctttgtcctctgagcagaagggttggcaaagagggaaggggacaggccagttctgcacctggcctttctccagaatgaaggcctccacctcccgtccgtccccacagaaagaaaagtaaactgttttcgcggctgcgcagaaagaagaacatggtacgagcagtgagtgctgcggaggggcgcagaggcccgcgccctggctggccctgtgcatgcgccttgcgccctgctcccaggtgctcactaacccgtaatctgctgctctgtgtgcatgtgctgcccggcagggctgtcgtgtgcgtgttgggtgggaaggcggaggcggcgcggggcgggctggcctctgagcatctggctgcatttagcacg

SEQ ID NO: 179 - DNA, 502 bp, Artificial Sequence
  Synthetic
gagcctcctgcccctcaccaggccctgttagcatcacctcgggcacctggccacagcaggggccagtcagggcaccccgggatagcacgcccaggccctgtgcaaggcctctggcacttaggagaggcttttgcccctttgtcctctgagcagaagggttggcaaagagggaaggggacaggccagttctgcacctggcctttctccagaatgaaggcctccacctcccgtccgtccccacagaaagaaaagtaaactgttttcgcggctgcgcagaaagaagaacatggtacgagcagtgagtgctgcggaggggcgcagaggcccgcgccctggctggccctgtgcatgctgccttgcgccctgctcccaggtgccactaacccgtaatctggctctgtgtgcagtgctgcccggcagggctgtcgtgtgcgtgttgggtgggaaggcggaggcggcgcggggcgggctggcctctgagcatctggctgcatttagcacg

SEQ ID NO: 180 - DNA, 503 bp, Artificial Sequence
  Synthetic
gagcctcctgcccctcaccaggccctgttagcatcacctcgggcacctggccacagcaggggccagtcagggcaccccgggatagcacgcccaggccctgtgcaaggcctctggcacttaggagaggcttttgcccctttgtcctctgagcagaagggttggcaaagagggaaggggacaggccagttctgcacctggcctttctccagaatgaaggcctccacctcccgtccgtccccacagaaagaaaagtaaactgttttcgcggctgcgcagaaagaagaacatggtacgagcagtgagtgctgcggaggggcgcagaggcccgcgccctggctggccctgtgcatgctgccttgcgccctgctcccaggtgccactaacccgtaatctggctctgtgtgcatgtgctgcccggcagggctgtcgtgtgcgtgttgggtgggaaggcggaggcggcgcggggcgggctggcctctgagcatctggctgcatttagcacg

SEQ ID NO: 181 - DNA, 504 bp, Artificial Sequence
  Synthetic
gagcctcctgcccctcaccaggccctgttagcatcacctcgggcacctggccacagcaggggccagtcagggcaccccgggatagcacgcccaggccctgtgcaaggcctctggcacttaggagaggcttttgcccctttgtcctctgagcagaagggttggcaaagagggaaggggacaggccagttctgcacctggcctttctccagaatgaaggcctccacctcccgtccgtccccacagaaagaaaagtaaactgttttcgcggctgcgcagaaagaagaacatggtacgagcagtgagtgctgcggaggggcgcagaggcccgcgccctggctggccctgtgcatgctgccttgcgccctgctcccaggtgccactaacccgtaatctgctgctctgtgtgcagtgctgcccggcagggctgtcgtgtgcgtgttgggtgggaaggcggaggcggcgcggggcgggctggcctctgagcatctggctgcatttagcacg

SEQ ID NO: 182 - DNA, 505 bp, Artificial Sequence
  Synthetic
gagcctcctgcccctcaccaggccctgttagcatcacctcgggcacctggccacagcaggggccagtcagggcaccccgggatagcacgcccaggccctgtgcaaggcctctggcacttaggagaggcttttgcccctttgtcctctgagcagaagggttggcaaagagggaaggggacaggccagttctgcacctggcctttctccagaatgaaggcctccacctcccgtccgtccccacagaaagaaaagtaaactgttttcgcggctgcgcagaaagaagaacatggtacgagcagtgagtgctgcggaggggcgcagaggcccgcgccctggctggccctgtgcatgctgccttgcgccctgctcccaggtgccactaacccgtaatctgctgctctgtgtgcatgtgctgcccggcagggctgtcgtgtgcgtgttgggtgggaaggcggaggcggcgcggggcgggctggcctctgagcatctggctgcatttagcacg

SEQ ID NO: 183 - DNA, 503 bp, Artificial Sequence
  Synthetic
gagcctcctgcccctcaccaggccctgttagcatcacctcgggcacctggccacagcaggggccagtcagggcaccccgggatagcacgcccaggccctgtgcaaggcctctggcacttaggagaggcttttgcccctttgtcctctgagcagaagggttggcaaagagggaaggggacaggccagttctgcacctggcctttctccagaatgaaggcctccacctcccgtccgtccccacagaaagaaaagtaaactgttttcgcggctgcgcagaaagaagaacatggtacgagcagtgagtgctgcggaggggcgcagaggcccgcgccctggctggccctgtgcatgctgccttgcgccctgctcccaggtgctcactaacccgtaatctggctctgtgtgcagtgctgcccggcagggctgtcgtgtgcgtgttgggtgggaaggcggaggcggcgcggggcgggctggcctctgagcatctggctgcatttagcacg

SEQ ID NO: 184 - DNA, 504 bp, Artificial Sequence
  Synthetic
gagcctcctgcccctcaccaggccctgttagcatcacctcgggcacctggccacagcaggggccagtcagggcaccccgggatagcacgcccaggccctgtgcaaggcctctggcacttaggagaggcttttgcccctttgtcctctgagcagaagggttggcaaagagggaaggggacaggccagttctgcacctggcctttctccagaatgaaggcctccacctcccgtccgtccccacagaaagaaaagtaaactgttttcgcggctgcgcagaaagaagaacatggtacgagcagtgagtgctgcggaggggcgcagaggcccgcgccctggctggccctgtgcatgctgccttgcgccctgctcccaggtgctcactaacccgtaatctggctctgtgtgcatgtgctgcccggcagggctgtcgtgtgcgtgttgggtgggaaggcggaggcggcgcggggcgggctggcctctgagcatctggctgcatttagcacg

SEQ ID NO: 185 - DNA, 505 bp, Artificial Sequence
  Synthetic
gagcctcctgcccctcaccaggccctgttagcatcacctcgggcacctggccacagcaggggccagtcagggcaccccgggatagcacgcccaggccctgtgcaaggcctctggcacttaggagaggcttttgcccctttgtcctctgagcagaagggttggcaaagagggaaggggacaggccagttctgcacctggcctttctccagaatgaaggcctccacctcccgtccgtccccacagaaagaaaagtaaactgttttcgcggctgcgcagaaagaagaacatggtacgagcagtgagtgctgcggaggggcgcagaggcccgcgccctggctggccctgtgcatgctgccttgcgccctgctcccaggtgctcactaacccgtaatctgctgctctgtgtgcagtgctgcccggcagggctgtcgtgtgcgtgttgggtgggaaggcggaggcggcgcggggcgggctggcctctgagcatctggctgcatttagcacg

SEQ ID NO: 186 - DNA, 506 bp, Artificial Sequence
  Synthetic
gagcctcctgcccctcaccaggccctgttagcatcacctcgggcacctggccacagcaggggccagtcagggcaccccgggatagcacgcccaggccctgtgcaaggcctctggcacttaggagaggcttttgcccctttgtcctctgagcagaagggttggcaaagagggaaggggacaggccagttctgcacctggcctttctccagaatgaaggcctccacctcccgtccgtccccacagaaagaaaagtaaactgttttcgcggctgcgcagaaagaagaacatggtacgagcagtgagtgctgcggaggggcgcagaggcccgcgccctggctggccctgtgcatgctgccttgcgccctgctcccaggtgctcactaacccgtaatctgctgctctgtgtgcatgtgctgcccggcagggctgtcgtgtgcgtgttgggtgggaaggcggaggcggcgcggggcgggctggcctctgagcatctggctgcatttagcacg

SEQ ID NO: 187 - DNA, 501 bp, Artificial Sequence
  Synthetic
gagcctcctgcccctcaccaggccctgttagcatcacctcgggcacctggccacagcaggggccagtcagggcaccccgggatagcacgcccaggccctgtgcaaggcctctggcacttaggagaggcttttgcccctttgtcctctgagcagaagggttggcaaagagggaaggggacaggccagttctgcacctggcctttctccagaatgaaggcctccacctcccgtccgtccccacagaaagaaaagtaaactgttttcgcggctgcgcagaaagaagaacatggttcgtgcagtgagtgctgcggaggggcgcagaggcccgcgccctggctggccctgtgcatgcgccttgcgccctgctcccaggtgccactaacccgtaatctggctctgtgtgcagtgctgcccggcagggctgtcgtgtgcgtgttgggtgggaaggcggaggcggcgcggggcgggctggcctctgagcatctggctgcatttagcacg

SEQ ID NO: 188 - DNA, 502 bp, Artificial Sequence
  Synthetic
gagcctcctgcccctcaccaggccctgttagcatcacctcgggcacctggccacagcaggggccagtcagggcaccccgggatagcacgcccaggccctgtgcaaggcctctggcacttaggagaggcttttgcccctttgtcctctgagcagaagggttggcaaagagggaaggggacaggccagttctgcacctggcctttctccagaatgaaggcctccacctcccgtccgtccccacagaaagaaaagtaaactgttttcgcggctgcgcagaaagaagaacatggttcgtgcagtgagtgctgcggaggggcgcagaggcccgcgccctggctggccctgtgcatgcgccttgcgccctgctcccaggtgccactaacccgtaatctggctctgtgtgcatgtgctgcccggcagggctgtcgtgtgcgtgttgggtgggaaggcggaggcggcgcggggcgggctggcctctgagcatctggctgcatttagcacg

SEQ ID NO: 189 - DNA, 503 bp, Artificial Sequence
  Synthetic
gagcctcctgcccctcaccaggccctgttagcatcacctcgggcacctggccacagcaggggccagtcagggcaccccgggatagcacgcccaggccctgtgcaaggcctctggcacttaggagaggcttttgcccctttgtcctctgagcagaagggttggcaaagagggaaggggacaggccagttctgcacctggcctttctccagaatgaaggcctccacctcccgtccgtccccacagaaagaaaagtaaactgttttcgcggctgcgcagaaagaagaacatggttcgtgcagtgagtgctgcggaggggcgcagaggcccgcgccctggctggccctgtgcatgcgccttgcgccctgctcccaggtgccactaacccgtaatctgctgctctgtgtgcagtgctgcccggcagggctgtcgtgtgcgtgttgggtgggaaggcggaggcggcgcggggcgggctggcctctgagcatctggctgcatttagcacg

SEQ ID NO: 190 - DNA, 504 bp, Artificial Sequence
  Synthetic
gagcctcctgcccctcaccaggccctgttagcatcacctcgggcacctggccacagcaggggccagtcagggcaccccgggatagcacgcccaggccctgtgcaaggcctctggcacttaggagaggcttttgcccctttgtcctctgagcagaagggttggcaaagagggaaggggacaggccagttctgcacctggcctttctccagaatgaaggcctccacctcccgtccgtccccacagaaagaaaagtaaactgttttcgcggctgcgcagaaagaagaacatggttcgtgcagtgagtgctgcggaggggcgcagaggcccgcgccctggctggccctgtgcatgcgccttgcgccctgctcccaggtgccactaacccgtaatctgctgctctgtgtgcatgtgctgcccggcagggctgtcgtgtgcgtgttgggtgggaaggcggaggcggcgcggggcgggctggcctctgagcatctggctgcatttagcacg

SEQ ID NO: 191 - DNA, 502 bp, Artificial Sequence
  Synthetic
gagcctcctgcccctcaccaggccctgttagcatcacctcgggcacctggccacagcaggggccagtcagggcaccccgggatagcacgcccaggccctgtgcaaggcctctggcacttaggagaggcttttgcccctttgtcctctgagcagaagggttggcaaagagggaaggggacaggccagttctgcacctggcctttctccagaatgaaggcctccacctcccgtccgtccccacagaaagaaaagtaaactgttttcgcggctgcgcagaaagaagaacatggttcgtgcagtgagtgctgcggaggggcgcagaggcccgcgccctggctggccctgtgcatgcgccttgcgccctgctcccaggtgctcactaacccgtaatctggctctgtgtgcagtgctgcccggcagggctgtcgtgtgcgtgttgggtgggaaggcggaggcggcgcggggcgggctggcctctgagcatctggctgcatttagcacg

SEQ ID NO: 192 - DNA, 503 bp, Artificial Sequence
  Synthetic
gagcctcctgcccctcaccaggccctgttagcatcacctcgggcacctggccacagcaggggccagtcagggcaccccgggatagcacgcccaggccctgtgcaaggcctctggcacttaggagaggcttttgcccctttgtcctctgagcagaagggttggcaaagagggaaggggacaggccagttctgcacctggcctttctccagaatgaaggcctccacctcccgtccgtccccacagaaagaaaagtaaactgttttcgcggctgcgcagaaagaagaacatggttcgtgcagtgagtgctgcggaggggcgcagaggcccgcgccctggctggccctgtgcatgcgccttgcgccctgctcccaggtgctcactaacccgtaatctggctctgtgtgcatgtgctgcccggcagggctgtcgtgtgcgtgttgggtgggaaggcggaggcggcgcggggcgggctggcctctgagcatctggctgcatttagcacg

SEQ ID NO: 193 - DNA, 504 bp, Artificial Sequence
  Synthetic
gagcctcctgcccctcaccaggccctgttagcatcacctcgggcacctggccacagcaggggccagtcagggcaccccgggatagcacgcccaggccctgtgcaaggcctctggcacttaggagaggcttttgcccctttgtcctctgagcagaagggttggcaaagagggaaggggacaggccagttctgcacctggcctttctccagaatgaaggcctccacctcccgtccgtccccacagaaagaaaagtaaactgttttcgcggctgcgcagaaagaagaacatggttcgtgcagtgagtgctgcggaggggcgcagaggcccgcgccctggctggccctgtgcatgcgccttgcgccctgctcccaggtgctcactaacccgtaatctgctgctctgtgtgcagtgctgcccggcagggctgtcgtgtgcgtgttgggtgggaaggcggaggcggcgcggggcgggctggcctctgagcatctggctgcatttagcacg

SEQ ID NO: 194 - DNA, 505 bp, Artificial Sequence
  Synthetic
gagcctcctgcccctcaccaggccctgttagcatcacctcgggcacctggccacagcaggggccagtcagggcaccccgggatagcacgcccaggccctgtgcaaggcctctggcacttaggagaggcttttgcccctttgtcctctgagcagaagggttggcaaagagggaaggggacaggccagttctgcacctggcctttctccagaatgaaggcctccacctcccgtccgtccccacagaaagaaaagtaaactgttttcgcggctgcgcagaaagaagaacatggttcgtgcagtgagtgctgcggaggggcgcagaggcccgcgccctggctggccctgtgcatgcgccttgcgccctgctcccaggtgctcactaacccgtaatctgctgctctgtgtgcatgtgctgcccggcagggctgtcgtgtgcgtgttgggtgggaaggcggaggcggcgcggggcgggctggcctctgagcatctggctgcatttagcacg

SEQ ID NO: 195 - DNA, 502 bp, Artificial Sequence
  Synthetic
gagcctcctgcccctcaccaggccctgttagcatcacctcgggcacctggccacagcaggggccagtcagggcaccccgggatagcacgcccaggccctgtgcaaggcctctggcacttaggagaggcttttgcccctttgtcctctgagcagaagggttggcaaagagggaaggggacaggccagttctgcacctggcctttctccagaatgaaggcctccacctcccgtccgtccccacagaaagaaaagtaaactgttttcgcggctgcgcagaaagaagaacatggttcgtgcagtgagtgctgcggaggggcgcagaggcccgcgccctggctggccctgtgcatgctgccttgcgccctgctcccaggtgccactaacccgtaatctggctctgtgtgcagtgctgcccggcagggctgtcgtgtgcgtgttgggtgggaaggcggaggcggcgcggggcgggctggcctctgagcatctggctgcatttagcacg

SEQ ID NO: 196 - DNA, 503 bp, Artificial Sequence
  Synthetic
gagcctcctgcccctcaccaggccctgttagcatcacctcgggcacctggccacagcaggggccagtcagggcaccccgggatagcacgcccaggccctgtgcaaggcctctggcacttaggagaggcttttgcccctttgtcctctgagcagaagggttggcaaagagggaaggggacaggccagttctgcacctggcctttctccagaatgaaggcctccacctcccgtccgtccccacagaaagaaaagtaaactgttttcgcggctgcgcagaaagaagaacatggttcgtgcagtgagtgctgcggaggggcgcagaggcccgcgccctggctggccctgtgcatgctgccttgcgccctgctcccaggtgccactaacccgtaatctggctctgtgtgcatgtgctgcccggcagggctgtcgtgtgcgtgttgggtgggaaggcggaggcggcgcggggcgggctggcctctgagcatctggctgcatttagcacg

SEQ ID NO: 197 - DNA, 504 bp, Artificial Sequence
  Synthetic
gagcctcctgcccctcaccaggccctgttagcatcacctcgggcacctggccacagcaggggccagtcagggcaccccgggatagcacgcccaggccctgtgcaaggcctctggcacttaggagaggcttttgcccctttgtcctctgagcagaagggttggcaaagagggaaggggacaggccagttctgcacctggcctttctccagaatgaaggcctccacctcccgtccgtccccacagaaagaaaagtaaactgttttcgcggctgcgcagaaagaagaacatggttcgtgcagtgagtgctgcggaggggcgcagaggcccgcgccctggctggccctgtgcatgctgccttgcgccctgctcccaggtgccactaacccgtaatctgctgctctgtgtgcagtgctgcccggcagggctgtcgtgtgcgtgttgggtgggaaggcggaggcggcgcggggcgggctggcctctgagcatctggctgcatttagcacg

SEQ ID NO: 198 - DNA, 505 bp, Artificial Sequence
  Synthetic
gagcctcctgcccctcaccaggccctgttagcatcacctcgggcacctggccacagcaggggccagtcagggcaccccgggatagcacgcccaggccctgtgcaaggcctctggcacttaggagaggcttttgcccctttgtcctctgagcagaagggttggcaaagagggaaggggacaggccagttctgcacctggcctttctccagaatgaaggcctccacctcccgtccgtccccacagaaagaaaagtaaactgttttcgcggctgcgcagaaagaagaacatggttcgtgcagtgagtgctgcggaggggcgcagaggcccgcgccctggctggccctgtgcatgctgccttgcgccctgctcccaggtgccactaacccgtaatctgctgctctgtgtgcatgtgctgcccggcagggctgtcgtgtgcgtgttgggtgggaaggcggaggcggcgcggggcgggctggcctctgagcatctggctgcatttagcacg

SEQ ID NO: 199 - DNA, 503 bp, Artificial Sequence
  Synthetic
gagcctcctgcccctcaccaggccctgttagcatcacctcgggcacctggccacagcaggggccagtcagggcaccccgggatagcacgcccaggccctgtgcaaggcctctggcacttaggagaggcttttgcccctttgtcctctgagcagaagggttggcaaagagggaaggggacaggccagttctgcacctggcctttctccagaatgaaggcctccacctcccgtccgtccccacagaaagaaaagtaaactgttttcgcggctgcgcagaaagaagaacatggttcgtgcagtgagtgctgcggaggggcgcagaggcccgcgccctggctggccctgtgcatgctgccttgcgccctgctcccaggtgctcactaacccgtaatctggctctgtgtgcagtgctgcccggcagggctgtcgtgtgcgtgttgggtgggaaggcggaggcggcgcggggcgggctggcctctgagcatctggctgcatttagcacg

SEQ ID NO: 200 - DNA, 504 bp, Artificial Sequence
  Synthetic
gagcctcctgcccctcaccaggccctgttagcatcacctcgggcacctggccacagcaggggccagtcagggcaccccgggatagcacgcccaggccctgtgcaaggcctctggcacttaggagaggcttttgcccctttgtcctctgagcagaagggttggcaaagagggaaggggacaggccagttctgcacctggcctttctccagaatgaaggcctccacctcccgtccgtccccacagaaagaaaagtaaactgttttcgcggctgcgcagaaagaagaacatggttcgtgcagtgagtgctgcggaggggcgcagaggcccgcgccctggctggccctgtgcatgctgccttgcgccctgctcccaggtgctcactaacccgtaatctggctctgtgtgcatgtgctgcccggcagggctgtcgtgtgcgtgttgggtgggaaggcggaggcggcgcggggcgggctggcctctgagcatctggctgcatttagcacg

SEQ ID NO: 201 - DNA, 505 bp, Artificial Sequence
  Synthetic
gagcctcctgcccctcaccaggccctgttagcatcacctcgggcacctggccacagcaggggccagtcagggcaccccgggatagcacgcccaggccctgtgcaaggcctctggcacttaggagaggcttttgcccctttgtcctctgagcagaagggttggcaaagagggaaggggacaggccagttctgcacctggcctttctccagaatgaaggcctccacctcccgtccgtccccacagaaagaaaagtaaactgttttcgcggctgcgcagaaagaagaacatggttcgtgcagtgagtgctgcggaggggcgcagaggcccgcgccctggctggccctgtgcatgctgccttgcgccctgctcccaggtgctcactaacccgtaatctgctgctctgtgtgcagtgctgcccggcagggctgtcgtgtgcgtgttgggtgggaaggcggaggcggcgcggggcgggctggcctctgagcatctggctgcatttagcacg

SEQ ID NO: 202 - DNA, 506 bp, Artificial Sequence
  Synthetic
gagcctcctgcccctcaccaggccctgttagcatcacctcgggcacctggccacagcaggggccagtcagggcaccccgggatagcacgcccaggccctgtgcaaggcctctggcacttaggagaggcttttgcccctttgtcctctgagcagaagggttggcaaagagggaaggggacaggccagttctgcacctggcctttctccagaatgaaggcctccacctcccgtccgtccccacagaaagaaaagtaaactgttttcgcggctgcgcagaaagaagaacatggttcgtgcagtgagtgctgcggaggggcgcagaggcccgcgccctggctggccctgtgcatgctgccttgcgccctgctcccaggtgctcactaacccgtaatctgctgctctgtgtgcatgtgctgcccggcagggctgtcgtgtgcgtgttgggtgggaaggcggaggcggcgcggggcgggctggcctctgagcatctggctgcatttagcacg

SEQ ID NO: 203 - DNA, 501 bp, Artificial Sequence
  Synthetic
gagcctcctgcccctcaccaggccctgttagcatcacctcgggcacctggccacagcaggggccagtcagggcaccccgggatagcacgcccaggccctgtgcaaggcctctggcacttaggagaggcttttgcccctttgtcctctgagcagaagggttggcaaagagggaaggggacaggccagttctgcacctggcctttctccagaatgaaggcctccaccacccgtccttccccacagaaagaaaagtaaactgttttcgcggctgcgcagaaagaagaacatggtacgtgcagtgagtgctgcggaggggcgcagaggcccgcgccctggctggccctgtgcatgcgccttgcgccctgctcccaggtgccactaacccgtaatctggctctgtgtgcagtgctgcccggcagggctgtcgtgtgcgtgttgggtgggaaggcggaggcggcgcggggcgggctggcctctgagcatctggctgcatttagcacg

SEQ ID NO: 204 - DNA, 502 bp, Artificial Sequence
  Synthetic
gagcctcctgcccctcaccaggccctgttagcatcacctcgggcacctggccacagcaggggccagtcagggcaccccgggatagcacgcccaggccctgtgcaaggcctctggcacttaggagaggcttttgcccctttgtcctctgagcagaagggttggcaaagagggaaggggacaggccagttctgcacctggcctttctccagaatgaaggcctccaccacccgtccttccccacagaaagaaaagtaaactgttttcgcggctgcgcagaaagaagaacatggtacgtgcagtgagtgctgcggaggggcgcagaggcccgcgccctggctggccctgtgcatgcgccttgcgccctgctcccaggtgccactaacccgtaatctggctctgtgtgcatgtgctgcccggcagggctgtcgtgtgcgtgttgggtgggaaggcggaggcggcgcggggcgggctggcctctgagcatctggctgcatttagcacg

SEQ ID NO: 205 - DNA, 503 bp, Artificial Sequence
  Synthetic
gagcctcctgcccctcaccaggccctgttagcatcacctcgggcacctggccacagcaggggccagtcagggcaccccgggatagcacgcccaggccctgtgcaaggcctctggcacttaggagaggcttttgcccctttgtcctctgagcagaagggttggcaaagagggaaggggacaggccagttctgcacctggcctttctccagaatgaaggcctccaccacccgtccttccccacagaaagaaaagtaaactgttttcgcggctgcgcagaaagaagaacatggtacgtgcagtgagtgctgcggaggggcgcagaggcccgcgccctggctggccctgtgcatgcgccttgcgccctgctcccaggtgccactaacccgtaatctgctgctctgtgtgcagtgctgcccggcagggctgtcgtgtgcgtgttgggtgggaaggcggaggcggcgcggggcgggctggcctctgagcatctggctgcatttagcacg

SEQ ID NO: 206 - DNA, 504 bp, Artificial Sequence
  Synthetic
gagcctcctgcccctcaccaggccctgttagcatcacctcgggcacctggccacagcaggggccagtcagggcaccccgggatagcacgcccaggccctgtgcaaggcctctggcacttaggagaggcttttgcccctttgtcctctgagcagaagggttggcaaagagggaaggggacaggccagttctgcacctggcctttctccagaatgaaggcctccaccacccgtccttccccacagaaagaaaagtaaactgttttcgcggctgcgcagaaagaagaacatggtacgtgcagtgagtgctgcggaggggcgcagaggcccgcgccctggctggccctgtgcatgcgccttgcgccctgctcccaggtgccactaacccgtaatctgctgctctgtgtgcatgtgctgcccggcagggctgtcgtgtgcgtgttgggtgggaaggcggaggcggcgcggggcgggctggcctctgagcatctggctgcatttagcacg

SEQ ID NO: 207 - DNA, 502 bp, Artificial Sequence
  Synthetic
gagcctcctgcccctcaccaggccctgttagcatcacctcgggcacctggccacagcaggggccagtcagggcaccccgggatagcacgcccaggccctgtgcaaggcctctggcacttaggagaggcttttgcccctttgtcctctgagcagaagggttggcaaagagggaaggggacaggccagttctgcacctggcctttctccagaatgaaggcctccaccacccgtccttccccacagaaagaaaagtaaactgttttcgcggctgcgcagaaagaagaacatggtacgtgcagtgagtgctgcggaggggcgcagaggcccgcgccctggctggccctgtgcatgcgccttgcgccctgctcccaggtgctcactaacccgtaatctggctctgtgtgcagtgctgcccggcagggctgtcgtgtgcgtgttgggtgggaaggcggaggcggcgcggggcgggctggcctctgagcatctggctgcatttagcacg

SEQ ID NO: 208 - DNA, 503 bp, Artificial Sequence
  Synthetic
gagcctcctgcccctcaccaggccctgttagcatcacctcgggcacctggccacagcaggggccagtcagggcaccccgggatagcacgcccaggccctgtgcaaggcctctggcacttaggagaggcttttgcccctttgtcctctgagcagaagggttggcaaagagggaaggggacaggccagttctgcacctggcctttctccagaatgaaggcctccaccacccgtccttccccacagaaagaaaagtaaactgttttcgcggctgcgcagaaagaagaacatggtacgtgcagtgagtgctgcggaggggcgcagaggcccgcgccctggctggccctgtgcatgcgccttgcgccctgctcccaggtgctcactaacccgtaatctggctctgtgtgcatgtgctgcccggcagggctgtcgtgtgcgtgttgggtgggaaggcggaggcggcgcggggcgggctggcctctgagcatctggctgcatttagcacg

SEQ ID NO: 209 - DNA, 504 bp, Artificial Sequence
  Synthetic
gagcctcctgcccctcaccaggccctgttagcatcacctcgggcacctggccacagcaggggccagtcagggcaccccgggatagcacgcccaggccctgtgcaaggcctctggcacttaggagaggcttttgcccctttgtcctctgagcagaagggttggcaaagagggaaggggacaggccagttctgcacctggcctttctccagaatgaaggcctccaccacccgtccttccccacagaaagaaaagtaaactgttttcgcggctgcgcagaaagaagaacatggtacgtgcagtgagtgctgcggaggggcgcagaggcccgcgccctggctggccctgtgcatgcgccttgcgccctgctcccaggtgctcactaacccgtaatctgctgctctgtgtgcagtgctgcccggcagggctgtcgtgtgcgtgttgggtgggaaggcggaggcggcgcggggcgggctggcctctgagcatctggctgcatttagcacg

SEQ ID NO: 210 - DNA, 505 bp, Artificial Sequence
  Synthetic
gagcctcctgcccctcaccaggccctgttagcatcacctcgggcacctggccacagcaggggccagtcagggcaccccgggatagcacgcccaggccctgtgcaaggcctctggcacttaggagaggcttttgcccctttgtcctctgagcagaagggttggcaaagagggaaggggacaggccagttctgcacctggcctttctccagaatgaaggcctccaccacccgtccttccccacagaaagaaaagtaaactgttttcgcggctgcgcagaaagaagaacatggtacgtgcagtgagtgctgcggaggggcgcagaggcccgcgccctggctggccctgtgcatgcgccttgcgccctgctcccaggtgctcactaacccgtaatctgctgctctgtgtgcatgtgctgcccggcagggctgtcgtgtgcgtgttgggtgggaaggcggaggcggcgcggggcgggctggcctctgagcatctggctgcatttagcacg

SEQ ID NO: 211 - DNA, 502 bp, Artificial Sequence
  Synthetic
gagcctcctgcccctcaccaggccctgttagcatcacctcgggcacctggccacagcaggggccagtcagggcaccccgggatagcacgcccaggccctgtgcaaggcctctggcacttaggagaggcttttgcccctttgtcctctgagcagaagggttggcaaagagggaaggggacaggccagttctgcacctggcctttctccagaatgaaggcctccaccacccgtccttccccacagaaagaaaagtaaactgttttcgcggctgcgcagaaagaagaacatggtacgtgcagtgagtgctgcggaggggcgcagaggcccgcgccctggctggccctgtgcatgctgccttgcgccctgctcccaggtgccactaacccgtaatctggctctgtgtgcagtgctgcccggcagggctgtcgtgtgcgtgttgggtgggaaggcggaggcggcgcggggcgggctggcctctgagcatctggctgcatttagcacg

SEQ ID NO: 212 - DNA, 503 bp, Artificial Sequence
  Synthetic
gagcctcctgcccctcaccaggccctgttagcatcacctcgggcacctggccacagcaggggccagtcagggcaccccgggatagcacgcccaggccctgtgcaaggcctctggcacttaggagaggcttttgcccctttgtcctctgagcagaagggttggcaaagagggaaggggacaggccagttctgcacctggcctttctccagaatgaaggcctccaccacccgtccttccccacagaaagaaaagtaaactgttttcgcggctgcgcagaaagaagaacatggtacgtgcagtgagtgctgcggaggggcgcagaggcccgcgccctggctggccctgtgcatgctgccttgcgccctgctcccaggtgccactaacccgtaatctggctctgtgtgcatgtgctgcccggcagggctgtcgtgtgcgtgttgggtgggaaggcggaggcggcgcggggcgggctggcctctgagcatctggctgcatttagcacg

SEQ ID NO: 213 - DNA, 504 bp, Artificial Sequence
  Synthetic
gagcctcctgcccctcaccaggccctgttagcatcacctcgggcacctggccacagcaggggccagtcagggcaccccgggatagcacgcccaggccctgtgcaaggcctctggcacttaggagaggcttttgcccctttgtcctctgagcagaagggttggcaaagagggaaggggacaggccagttctgcacctggcctttctccagaatgaaggcctccaccacccgtccttccccacagaaagaaaagtaaactgttttcgcggctgcgcagaaagaagaacatggtacgtgcagtgagtgctgcggaggggcgcagaggcccgcgccctggctggccctgtgcatgctgccttgcgccctgctcccaggtgccactaacccgtaatctgctgctctgtgtgcagtgctgcccggcagggctgtcgtgtgcgtgttgggtgggaaggcggaggcggcgcggggcgggctggcctctgagcatctggctgcatttagcacg

SEQ ID NO: 214 - DNA, 505 bp, Artificial Sequence
  Synthetic
gagcctcctgcccctcaccaggccctgttagcatcacctcgggcacctggccacagcaggggccagtcagggcaccccgggatagcacgcccaggccctgtgcaaggcctctggcacttaggagaggcttttgcccctttgtcctctgagcagaagggttggcaaagagggaaggggacaggccagttctgcacctggcctttctccagaatgaaggcctccaccacccgtccttccccacagaaagaaaagtaaactgttttcgcggctgcgcagaaagaagaacatggtacgtgcagtgagtgctgcggaggggcgcagaggcccgcgccctggctggccctgtgcatgctgccttgcgccctgctcccaggtgccactaacccgtaatctgctgctctgtgtgcatgtgctgcccggcagggctgtcgtgtgcgtgttgggtgggaaggcggaggcggcgcggggcgggctggcctctgagcatctggctgcatttagcacg

SEQ ID NO: 215 - DNA, 503 bp, Artificial Sequence
  Synthetic
gagcctcctgcccctcaccaggccctgttagcatcacctcgggcacctggccacagcaggggccagtcagggcaccccgggatagcacgcccaggccctgtgcaaggcctctggcacttaggagaggcttttgcccctttgtcctctgagcagaagggttggcaaagagggaaggggacaggccagttctgcacctggcctttctccagaatgaaggcctccaccacccgtccttccccacagaaagaaaagtaaactgttttcgcggctgcgcagaaagaagaacatggtacgtgcagtgagtgctgcggaggggcgcagaggcccgcgccctggctggccctgtgcatgctgccttgcgccctgctcccaggtgctcactaacccgtaatctggctctgtgtgcagtgctgcccggcagggctgtcgtgtgcgtgttgggtgggaaggcggaggcggcgcggggcgggctggcctctgagcatctggctgcatttagcacg

SEQ ID NO: 216 - DNA, 504 bp, Artificial Sequence
  Synthetic
gagcctcctgcccctcaccaggccctgttagcatcacctcgggcacctggccacagcaggggccagtcagggcaccccgggatagcacgcccaggccctgtgcaaggcctctggcacttaggagaggcttttgcccctttgtcctctgagcagaagggttggcaaagagggaaggggacaggccagttctgcacctggcctttctccagaatgaaggcctccaccacccgtccttccccacagaaagaaaagtaaactgttttcgcggctgcgcagaaagaagaacatggtacgtgcagtgagtgctgcggaggggcgcagaggcccgcgccctggctggccctgtgcatgctgccttgcgccctgctcccaggtgctcactaacccgtaatctggctctgtgtgcatgtgctgcccggcagggctgtcgtgtgcgtgttgggtgggaaggcggaggcggcgcggggcgggctggcctctgagcatctggctgcatttagcacg

SEQ ID NO: 217 - DNA, 505 bp, Artificial Sequence
  Synthetic
gagcctcctgcccctcaccaggccctgttagcatcacctcgggcacctggccacagcaggggccagtcagggcaccccgggatagcacgcccaggccctgtgcaaggcctctggcacttaggagaggcttttgcccctttgtcctctgagcagaagggttggcaaagagggaaggggacaggccagttctgcacctggcctttctccagaatgaaggcctccaccacccgtccttccccacagaaagaaaagtaaactgttttcgcggctgcgcagaaagaagaacatggtacgtgcagtgagtgctgcggaggggcgcagaggcccgcgccctggctggccctgtgcatgctgccttgcgccctgctcccaggtgctcactaacccgtaatctgctgctctgtgtgcagtgctgcccggcagggctgtcgtgtgcgtgttgggtgggaaggcggaggcggcgcggggcgggctggcctctgagcatctggctgcatttagcacg

SEQ ID NO: 218 - DNA, 506 bp, Artificial Sequence
  Synthetic
gagcctcctgcccctcaccaggccctgttagcatcacctcgggcacctggccacagcaggggccagtcagggcaccccgggatagcacgcccaggccctgtgcaaggcctctggcacttaggagaggcttttgcccctttgtcctctgagcagaagggttggcaaagagggaaggggacaggccagttctgcacctggcctttctccagaatgaaggcctccaccacccgtccttccccacagaaagaaaagtaaactgttttcgcggctgcgcagaaagaagaacatggtacgtgcagtgagtgctgcggaggggcgcagaggcccgcgccctggctggccctgtgcatgctgccttgcgccctgctcccaggtgctcactaacccgtaatctgctgctctgtgtgcatgtgctgcccggcagggctgtcgtgtgcgtgttgggtgggaaggcggaggcggcgcggggcgggctggcctctgagcatctggctgcatttagcacg

SEQ ID NO: 219 - DNA, 501 bp, Artificial Sequence
  Synthetic
gagcctcctgcccctcaccaggccctgttagcatcacctcgggcacctggccacagcaggggccagtcagggcaccccgggatagcacgcccaggccctgtgcaaggcctctggcacttaggagaggcttttgcccctttgtcctctgagcagaagggttggcaaagagggaaggggacaggccagttctgcacctggcctttctccagaatgaaggcctccaccacccgtccttccccacagaaagaaaagtaaactgttttcgcggctgcgcagaaagaagaacatggtaagtgcagtgagtgctgcggaggggcgcagaggcccgcgccctggctggccctgtgcatgcgccttgcgccctgctcccaggtgccactaacccgtaatctggctctgtgtgcagtgctgcccggcagggctgtcgtgtgcgtgttgggtgggaaggcggaggcggcgcggggcgggctggcctctgagcatctggctgcatttagcacg

SEQ ID NO: 220 - DNA, 502 bp, Artificial Sequence
  Synthetic
gagcctcctgcccctcaccaggccctgttagcatcacctcgggcacctggccacagcaggggccagtcagggcaccccgggatagcacgcccaggccctgtgcaaggcctctggcacttaggagaggcttttgcccctttgtcctctgagcagaagggttggcaaagagggaaggggacaggccagttctgcacctggcctttctccagaatgaaggcctccaccacccgtccttccccacagaaagaaaagtaaactgttttcgcggctgcgcagaaagaagaacatggtaagtgcagtgagtgctgcggaggggcgcagaggcccgcgccctggctggccctgtgcatgcgccttgcgccctgctcccaggtgccactaacccgtaatctggctctgtgtgcatgtgctgcccggcagggctgtcgtgtgcgtgttgggtgggaaggcggaggcggcgcggggcgggctggcctctgagcatctggctgcatttagcacg

SEQ ID NO: 221 - DNA, 503 bp, Artificial Sequence
  Synthetic
gagcctcctgcccctcaccaggccctgttagcatcacctcgggcacctggccacagcaggggccagtcagggcaccccgggatagcacgcccaggccctgtgcaaggcctctggcacttaggagaggcttttgcccctttgtcctctgagcagaagggttggcaaagagggaaggggacaggccagttctgcacctggcctttctccagaatgaaggcctccaccacccgtccttccccacagaaagaaaagtaaactgttttcgcggctgcgcagaaagaagaacatggtaagtgcagtgagtgctgcggaggggcgcagaggcccgcgccctggctggccctgtgcatgcgccttgcgccctgctcccaggtgccactaacccgtaatctgctgctctgtgtgcagtgctgcccggcagggctgtcgtgtgcgtgttgggtgggaaggcggaggcggcgcggggcgggctggcctctgagcatctggctgcatttagcacg

SEQ ID NO: 222 - DNA, 504 bp, Artificial Sequence
  Synthetic
gagcctcctgcccctcaccaggccctgttagcatcacctcgggcacctggccacagcaggggccagtcagggcaccccgggatagcacgcccaggccctgtgcaaggcctctggcacttaggagaggcttttgcccctttgtcctctgagcagaagggttggcaaagagggaaggggacaggccagttctgcacctggcctttctccagaatgaaggcctccaccacccgtccttccccacagaaagaaaagtaaactgttttcgcggctgcgcagaaagaagaacatggtaagtgcagtgagtgctgcggaggggcgcagaggcccgcgccctggctggccctgtgcatgcgccttgcgccctgctcccaggtgccactaacccgtaatctgctgctctgtgtgcatgtgctgcccggcagggctgtcgtgtgcgtgttgggtgggaaggcggaggcggcgcggggcgggctggcctctgagcatctggctgcatttagcacg

SEQ ID NO: 223 - DNA, 502 bp, Artificial Sequence
  Synthetic
gagcctcctgcccctcaccaggccctgttagcatcacctcgggcacctggccacagcaggggccagtcagggcaccccgggatagcacgcccaggccctgtgcaaggcctctggcacttaggagaggcttttgcccctttgtcctctgagcagaagggttggcaaagagggaaggggacaggccagttctgcacctggcctttctccagaatgaaggcctccaccacccgtccttccccacagaaagaaaagtaaactgttttcgcggctgcgcagaaagaagaacatggtaagtgcagtgagtgctgcggaggggcgcagaggcccgcgccctggctggccctgtgcatgcgccttgcgccctgctcccaggtgctcactaacccgtaatctggctctgtgtgcagtgctgcccggcagggctgtcgtgtgcgtgttgggtgggaaggcggaggcggcgcggggcgggctggcctctgagcatctggctgcatttagcacg

SEQ ID NO: 224 - DNA, 503 bp, Artificial Sequence
  Synthetic
gagcctcctgcccctcaccaggccctgttagcatcacctcgggcacctggccacagcaggggccagtcagggcaccccgggatagcacgcccaggccctgtgcaaggcctctggcacttaggagaggcttttgcccctttgtcctctgagcagaagggttggcaaagagggaaggggacaggccagttctgcacctggcctttctccagaatgaaggcctccaccacccgtccttccccacagaaagaaaagtaaactgttttcgcggctgcgcagaaagaagaacatggtaagtgcagtgagtgctgcggaggggcgcagaggcccgcgccctggctggccctgtgcatgcgccttgcgccctgctcccaggtgctcactaacccgtaatctggctctgtgtgcatgtgctgcccggcagggctgtcgtgtgcgtgttgggtgggaaggcggaggcggcgcggggcgggctggcctctgagcatctggctgcatttagcacg

SEQ ID NO: 225 - DNA, 504 bp, Artificial Sequence
  Synthetic
gagcctcctgcccctcaccaggccctgttagcatcacctcgggcacctggccacagcaggggccagtcagggcaccccgggatagcacgcccaggccctgtgcaaggcctctggcacttaggagaggcttttgcccctttgtcctctgagcagaagggttggcaaagagggaaggggacaggccagttctgcacctggcctttctccagaatgaaggcctccaccacccgtccttccccacagaaagaaaagtaaactgttttcgcggctgcgcagaaagaagaacatggtaagtgcagtgagtgctgcggaggggcgcagaggcccgcgccctggctggccctgtgcatgcgccttgcgccctgctcccaggtgctcactaacccgtaatctgctgctctgtgtgcagtgctgcccggcagggctgtcgtgtgcgtgttgggtgggaaggcggaggcggcgcggggcgggctggcctctgagcatctggctgcatttagcacg

SEQ ID NO: 226 - DNA, 505 bp, Artificial Sequence
  Synthetic
gagcctcctgcccctcaccaggccctgttagcatcacctcgggcacctggccacagcaggggccagtcagggcaccccgggatagcacgcccaggccctgtgcaaggcctctggcacttaggagaggcttttgcccctttgtcctctgagcagaagggttggcaaagagggaaggggacaggccagttctgcacctggcctttctccagaatgaaggcctccaccacccgtccttccccacagaaagaaaagtaaactgttttcgcggctgcgcagaaagaagaacatggtaagtgcagtgagtgctgcggaggggcgcagaggcccgcgccctggctggccctgtgcatgcgccttgcgccctgctcccaggtgctcactaacccgtaatctgctgctctgtgtgcatgtgctgcccggcagggctgtcgtgtgcgtgttgggtgggaaggcggaggcggcgcggggcgggctggcctctgagcatctggctgcatttagcacg

SEQ ID NO: 227 - DNA, 502 bp, Artificial Sequence
  Synthetic
gagcctcctgcccctcaccaggccctgttagcatcacctcgggcacctggccacagcaggggccagtcagggcaccccgggatagcacgcccaggccctgtgcaaggcctctggcacttaggagaggcttttgcccctttgtcctctgagcagaagggttggcaaagagggaaggggacaggccagttctgcacctggcctttctccagaatgaaggcctccaccacccgtccttccccacagaaagaaaagtaaactgttttcgcggctgcgcagaaagaagaacatggtaagtgcagtgagtgctgcggaggggcgcagaggcccgcgccctggctggccctgtgcatgctgccttgcgccctgctcccaggtgccactaacccgtaatctggctctgtgtgcagtgctgcccggcagggctgtcgtgtgcgtgttgggtgggaaggcggaggcggcgcggggcgggctggcctctgagcatctggctgcatttagcacg

SEQ ID NO: 228 - DNA, 503 bp, Artificial Sequence
  Synthetic
gagcctcctgcccctcaccaggccctgttagcatcacctcgggcacctggccacagcaggggccagtcagggcaccccgggatagcacgcccaggccctgtgcaaggcctctggcacttaggagaggcttttgcccctttgtcctctgagcagaagggttggcaaagagggaaggggacaggccagttctgcacctggcctttctccagaatgaaggcctccaccacccgtccttccccacagaaagaaaagtaaactgttttcgcggctgcgcagaaagaagaacatggtaagtgcagtgagtgctgcggaggggcgcagaggcccgcgccctggctggccctgtgcatgctgccttgcgccctgctcccaggtgccactaacccgtaatctggctctgtgtgcatgtgctgcccggcagggctgtcgtgtgcgtgttgggtgggaaggcggaggcggcgcggggcgggctggcctctgagcatctggctgcatttagcacg

SEQ ID NO: 229 - DNA, 504 bp, Artificial Sequence
  Synthetic
gagcctcctgcccctcaccaggccctgttagcatcacctcgggcacctggccacagcaggggccagtcagggcaccccgggatagcacgcccaggccctgtgcaaggcctctggcacttaggagaggcttttgcccctttgtcctctgagcagaagggttggcaaagagggaaggggacaggccagttctgcacctggcctttctccagaatgaaggcctccaccacccgtccttccccacagaaagaaaagtaaactgttttcgcggctgcgcagaaagaagaacatggtaagtgcagtgagtgctgcggaggggcgcagaggcccgcgccctggctggccctgtgcatgctgccttgcgccctgctcccaggtgccactaacccgtaatctgctgctctgtgtgcagtgctgcccggcagggctgtcgtgtgcgtgttgggtgggaaggcggaggcggcgcggggcgggctggcctctgagcatctggctgcatttagcacg

SEQ ID NO: 230 - DNA, 505 bp, Artificial Sequence
  Synthetic
gagcctcctgcccctcaccaggccctgttagcatcacctcgggcacctggccacagcaggggccagtcagggcaccccgggatagcacgcccaggccctgtgcaaggcctctggcacttaggagaggcttttgcccctttgtcctctgagcagaagggttggcaaagagggaaggggacaggccagttctgcacctggcctttctccagaatgaaggcctccaccacccgtccttccccacagaaagaaaagtaaactgttttcgcggctgcgcagaaagaagaacatggtaagtgcagtgagtgctgcggaggggcgcagaggcccgcgccctggctggccctgtgcatgctgccttgcgccctgctcccaggtgccactaacccgtaatctgctgctctgtgtgcatgtgctgcccggcagggctgtcgtgtgcgtgttgggtgggaaggcggaggcggcgcggggcgggctggcctctgagcatctggctgcatttagcacg

SEQ ID NO: 231 - DNA, 503 bp, Artificial Sequence
  Synthetic
gagcctcctgcccctcaccaggccctgttagcatcacctcgggcacctggccacagcaggggccagtcagggcaccccgggatagcacgcccaggccctgtgcaaggcctctggcacttaggagaggcttttgcccctttgtcctctgagcagaagggttggcaaagagggaaggggacaggccagttctgcacctggcctttctccagaatgaaggcctccaccacccgtccttccccacagaaagaaaagtaaactgttttcgcggctgcgcagaaagaagaacatggtaagtgcagtgagtgctgcggaggggcgcagaggcccgcgccctggctggccctgtgcatgctgccttgcgccctgctcccaggtgctcactaacccgtaatctggctctgtgtgcagtgctgcccggcagggctgtcgtgtgcgtgttgggtgggaaggcggaggcggcgcggggcgggctggcctctgagcatctggctgcatttagcacg

SEQ ID NO: 232 - DNA, 504 bp, Artificial Sequence
  Synthetic
gagcctcctgcccctcaccaggccctgttagcatcacctcgggcacctggccacagcaggggccagtcagggcaccccgggatagcacgcccaggccctgtgcaaggcctctggcacttaggagaggcttttgcccctttgtcctctgagcagaagggttggcaaagagggaaggggacaggccagttctgcacctggcctttctccagaatgaaggcctccaccacccgtccttccccacagaaagaaaagtaaactgttttcgcggctgcgcagaaagaagaacatggtaagtgcagtgagtgctgcggaggggcgcagaggcccgcgccctggctggccctgtgcatgctgccttgcgccctgctcccaggtgctcactaacccgtaatctggctctgtgtgcatgtgctgcccggcagggctgtcgtgtgcgtgttgggtgggaaggcggaggcggcgcggggcgggctggcctctgagcatctggctgcatttagcacg

SEQ ID NO: 233 - DNA, 505 bp, Artificial Sequence
  Synthetic
gagcctcctgcccctcaccaggccctgttagcatcacctcgggcacctggccacagcaggggccagtcagggcaccccgggatagcacgcccaggccctgtgcaaggcctctggcacttaggagaggcttttgcccctttgtcctctgagcagaagggttggcaaagagggaaggggacaggccagttctgcacctggcctttctccagaatgaaggcctccaccacccgtccttccccacagaaagaaaagtaaactgttttcgcggctgcgcagaaagaagaacatggtaagtgcagtgagtgctgcggaggggcgcagaggcccgcgccctggctggccctgtgcatgctgccttgcgccctgctcccaggtgctcactaacccgtaatctgctgctctgtgtgcagtgctgcccggcagggctgtcgtgtgcgtgttgggtgggaaggcggaggcggcgcggggcgggctggcctctgagcatctggctgcatttagcacg

SEQ ID NO: 234 - DNA, 506 bp, Artificial Sequence
  Synthetic
gagcctcctgcccctcaccaggccctgttagcatcacctcgggcacctggccacagcaggggccagtcagggcaccccgggatagcacgcccaggccctgtgcaaggcctctggcacttaggagaggcttttgcccctttgtcctctgagcagaagggttggcaaagagggaaggggacaggccagttctgcacctggcctttctccagaatgaaggcctccaccacccgtccttccccacagaaagaaaagtaaactgttttcgcggctgcgcagaaagaagaacatggtaagtgcagtgagtgctgcggaggggcgcagaggcccgcgccctggctggccctgtgcatgctgccttgcgccctgctcccaggtgctcactaacccgtaatctgctgctctgtgtgcatgtgctgcccggcagggctgtcgtgtgcgtgttgggtgggaaggcggaggcggcgcggggcgggctggcctctgagcatctggctgcatttagcacg

SEQ ID NO: 235 - DNA, 501 bp, Artificial Sequence
  Synthetic
gagcctcctgcccctcaccaggccctgttagcatcacctcgggcacctggccacagcaggggccagtcagggcaccccgggatagcacgcccaggccctgtgcaaggcctctggcacttaggagaggcttttgcccctttgtcctctgagcagaagggttggcaaagagggaaggggacaggccagttctgcacctggcctttctccagaatgaaggcctccaccacccgtccttccccacagaaagaaaagtaaactgttttcgcggctgcgcagaaagaagaacatggtaggtgcagtgagtgctgcggaggggcgcagaggcccgcgccctggctggccctgtgcatgcgccttgcgccctgctcccaggtgccactaacccgtaatctggctctgtgtgcagtgctgcccggcagggctgtcgtgtgcgtgttgggtgggaaggcggaggcggcgcggggcgggctggcctctgagcatctggctgcatttagcacg

SEQ ID NO: 236 - DNA, 502 bp, Artificial Sequence
  Synthetic
gagcctcctgcccctcaccaggccctgttagcatcacctcgggcacctggccacagcaggggccagtcagggcaccccgggatagcacgcccaggccctgtgcaaggcctctggcacttaggagaggcttttgcccctttgtcctctgagcagaagggttggcaaagagggaaggggacaggccagttctgcacctggcctttctccagaatgaaggcctccaccacccgtccttccccacagaaagaaaagtaaactgttttcgcggctgcgcagaaagaagaacatggtaggtgcagtgagtgctgcggaggggcgcagaggcccgcgccctggctggccctgtgcatgcgccttgcgccctgctcccaggtgccactaacccgtaatctggctctgtgtgcatgtgctgcccggcagggctgtcgtgtgcgtgttgggtgggaaggcggaggcggcgcggggcgggctggcctctgagcatctggctgcatttagcacg

SEQ ID NO: 237 - DNA, 503 bp, Artificial Sequence
  Synthetic
gagcctcctgcccctcaccaggccctgttagcatcacctcgggcacctggccacagcaggggccagtcagggcaccccgggatagcacgcccaggccctgtgcaaggcctctggcacttaggagaggcttttgcccctttgtcctctgagcagaagggttggcaaagagggaaggggacaggccagttctgcacctggcctttctccagaatgaaggcctccaccacccgtccttccccacagaaagaaaagtaaactgttttcgcggctgcgcagaaagaagaacatggtaggtgcagtgagtgctgcggaggggcgcagaggcccgcgccctggctggccctgtgcatgcgccttgcgccctgctcccaggtgccactaacccgtaatctgctgctctgtgtgcagtgctgcccggcagggctgtcgtgtgcgtgttgggtgggaaggcggaggcggcgcggggcgggctggcctctgagcatctggctgcatttagcacg

SEQ ID NO: 238 - DNA, 504 bp, Artificial Sequence
  Synthetic
gagcctcctgcccctcaccaggccctgttagcatcacctcgggcacctggccacagcaggggccagtcagggcaccccgggatagcacgcccaggccctgtgcaaggcctctggcacttaggagaggcttttgcccctttgtcctctgagcagaagggttggcaaagagggaaggggacaggccagttctgcacctggcctttctccagaatgaaggcctccaccacccgtccttccccacagaaagaaaagtaaactgttttcgcggctgcgcagaaagaagaacatggtaggtgcagtgagtgctgcggaggggcgcagaggcccgcgccctggctggccctgtgcatgcgccttgcgccctgctcccaggtgccactaacccgtaatctgctgctctgtgtgcatgtgctgcccggcagggctgtcgtgtgcgtgttgggtgggaaggcggaggcggcgcggggcgggctggcctctgagcatctggctgcatttagcacg

SEQ ID NO: 239 - DNA, 502 bp, Artificial Sequence
  Synthetic
gagcctcctgcccctcaccaggccctgttagcatcacctcgggcacctggccacagcaggggccagtcagggcaccccgggatagcacgcccaggccctgtgcaaggcctctggcacttaggagaggcttttgcccctttgtcctctgagcagaagggttggcaaagagggaaggggacaggccagttctgcacctggcctttctccagaatgaaggcctccaccacccgtccttccccacagaaagaaaagtaaactgttttcgcggctgcgcagaaagaagaacatggtaggtgcagtgagtgctgcggaggggcgcagaggcccgcgccctggctggccctgtgcatgcgccttgcgccctgctcccaggtgctcactaacccgtaatctggctctgtgtgcagtgctgcccggcagggctgtcgtgtgcgtgttgggtgggaaggcggaggcggcgcggggcgggctggcctctgagcatctggctgcatttagcacg

SEQ ID NO: 240 - DNA, 503 bp, Artificial Sequence
  Synthetic
gagcctcctgcccctcaccaggccctgttagcatcacctcgggcacctggccacagcaggggccagtcagggcaccccgggatagcacgcccaggccctgtgcaaggcctctggcacttaggagaggcttttgcccctttgtcctctgagcagaagggttggcaaagagggaaggggacaggccagttctgcacctggcctttctccagaatgaaggcctccaccacccgtccttccccacagaaagaaaagtaaactgttttcgcggctgcgcagaaagaagaacatggtaggtgcagtgagtgctgcggaggggcgcagaggcccgcgccctggctggccctgtgcatgcgccttgcgccctgctcccaggtgctcactaacccgtaatctggctctgtgtgcatgtgctgcccggcagggctgtcgtgtgcgtgttgggtgggaaggcggaggcggcgcggggcgggctggcctctgagcatctggctgcatttagcacg

SEQ ID NO: 241 - DNA, 504 bp, Artificial Sequence
  Synthetic
gagcctcctgcccctcaccaggccctgttagcatcacctcgggcacctggccacagcaggggccagtcagggcaccccgggatagcacgcccaggccctgtgcaaggcctctggcacttaggagaggcttttgcccctttgtcctctgagcagaagggttggcaaagagggaaggggacaggccagttctgcacctggcctttctccagaatgaaggcctccaccacccgtccttccccacagaaagaaaagtaaactgttttcgcggctgcgcagaaagaagaacatggtaggtgcagtgagtgctgcggaggggcgcagaggcccgcgccctggctggccctgtgcatgcgccttgcgccctgctcccaggtgctcactaacccgtaatctgctgctctgtgtgcagtgctgcccggcagggctgtcgtgtgcgtgttgggtgggaaggcggaggcggcgcggggcgggctggcctctgagcatctggctgcatttagcacg

SEQ ID NO: 242 - DNA, 505 bp, Artificial Sequence
  Synthetic
gagcctcctgcccctcaccaggccctgttagcatcacctcgggcacctggccacagcaggggccagtcagggcaccccgggatagcacgcccaggccctgtgcaaggcctctggcacttaggagaggcttttgcccctttgtcctctgagcagaagggttggcaaagagggaaggggacaggccagttctgcacctggcctttctccagaatgaaggcctccaccacccgtccttccccacagaaagaaaagtaaactgttttcgcggctgcgcagaaagaagaacatggtaggtgcagtgagtgctgcggaggggcgcagaggcccgcgccctggctggccctgtgcatgcgccttgcgccctgctcccaggtgctcactaacccgtaatctgctgctctgtgtgcatgtgctgcccggcagggctgtcgtgtgcgtgttgggtgggaaggcggaggcggcgcggggcgggctggcctctgagcatctggctgcatttagcacg

SEQ ID NO: 243 - DNA, 502 bp, Artificial Sequence
  Synthetic
gagcctcctgcccctcaccaggccctgttagcatcacctcgggcacctggccacagcaggggccagtcagggcaccccgggatagcacgcccaggccctgtgcaaggcctctggcacttaggagaggcttttgcccctttgtcctctgagcagaagggttggcaaagagggaaggggacaggccagttctgcacctggcctttctccagaatgaaggcctccaccacccgtccttccccacagaaagaaaagtaaactgttttcgcggctgcgcagaaagaagaacatggtaggtgcagtgagtgctgcggaggggcgcagaggcccgcgccctggctggccctgtgcatgctgccttgcgccctgctcccaggtgccactaacccgtaatctggctctgtgtgcagtgctgcccggcagggctgtcgtgtgcgtgttgggtgggaaggcggaggcggcgcggggcgggctggcctctgagcatctggctgcatttagcacg

SEQ ID NO: 244 - DNA, 503 bp, Artificial Sequence
  Synthetic
gagcctcctgcccctcaccaggccctgttagcatcacctcgggcacctggccacagcaggggccagtcagggcaccccgggatagcacgcccaggccctgtgcaaggcctctggcacttaggagaggcttttgcccctttgtcctctgagcagaagggttggcaaagagggaaggggacaggccagttctgcacctggcctttctccagaatgaaggcctccaccacccgtccttccccacagaaagaaaagtaaactgttttcgcggctgcgcagaaagaagaacatggtaggtgcagtgagtgctgcggaggggcgcagaggcccgcgccctggctggccctgtgcatgctgccttgcgccctgctcccaggtgccactaacccgtaatctggctctgtgtgcatgtgctgcccggcagggctgtcgtgtgcgtgttgggtgggaaggcggaggcggcgcggggcgggctggcctctgagcatctggctgcatttagcacg

SEQ ID NO: 245 - DNA, 504 bp, Artificial Sequence
  Synthetic
gagcctcctgcccctcaccaggccctgttagcatcacctcgggcacctggccacagcaggggccagtcagggcaccccgggatagcacgcccaggccctgtgcaaggcctctggcacttaggagaggcttttgcccctttgtcctctgagcagaagggttggcaaagagggaaggggacaggccagttctgcacctggcctttctccagaatgaaggcctccaccacccgtccttccccacagaaagaaaagtaaactgttttcgcggctgcgcagaaagaagaacatggtaggtgcagtgagtgctgcggaggggcgcagaggcccgcgccctggctggccctgtgcatgctgccttgcgccctgctcccaggtgccactaacccgtaatctgctgctctgtgtgcagtgctgcccggcagggctgtcgtgtgcgtgttgggtgggaaggcggaggcggcgcggggcgggctggcctctgagcatctggctgcatttagcacg

SEQ ID NO: 246 - DNA, 505 bp, Artificial Sequence
  Synthetic
gagcctcctgcccctcaccaggccctgttagcatcacctcgggcacctggccacagcaggggccagtcagggcaccccgggatagcacgcccaggccctgtgcaaggcctctggcacttaggagaggcttttgcccctttgtcctctgagcagaagggttggcaaagagggaaggggacaggccagttctgcacctggcctttctccagaatgaaggcctccaccacccgtccttccccacagaaagaaaagtaaactgttttcgcggctgcgcagaaagaagaacatggtaggtgcagtgagtgctgcggaggggcgcagaggcccgcgccctggctggccctgtgcatgctgccttgcgccctgctcccaggtgccactaacccgtaatctgctgctctgtgtgcatgtgctgcccggcagggctgtcgtgtgcgtgttgggtgggaaggcggaggcggcgcggggcgggctggcctctgagcatctggctgcatttagcacg

SEQ ID NO: 247 - DNA, 503 bp, Artificial Sequence
  Synthetic
gagcctcctgcccctcaccaggccctgttagcatcacctcgggcacctggccacagcaggggccagtcagggcaccccgggatagcacgcccaggccctgtgcaaggcctctggcacttaggagaggcttttgcccctttgtcctctgagcagaagggttggcaaagagggaaggggacaggccagttctgcacctggcctttctccagaatgaaggcctccaccacccgtccttccccacagaaagaaaagtaaactgttttcgcggctgcgcagaaagaagaacatggtaggtgcagtgagtgctgcggaggggcgcagaggcccgcgccctggctggccctgtgcatgctgccttgcgccctgctcccaggtgctcactaacccgtaatctggctctgtgtgcagtgctgcccggcagggctgtcgtgtgcgtgttgggtgggaaggcggaggcggcgcggggcgggctggcctctgagcatctggctgcatttagcacg

SEQ ID NO: 248 - DNA, 504 bp, Artificial Sequence
  Synthetic
gagcctcctgcccctcaccaggccctgttagcatcacctcgggcacctggccacagcaggggccagtcagggcaccccgggatagcacgcccaggccctgtgcaaggcctctggcacttaggagaggcttttgcccctttgtcctctgagcagaagggttggcaaagagggaaggggacaggccagttctgcacctggcctttctccagaatgaaggcctccaccacccgtccttccccacagaaagaaaagtaaactgttttcgcggctgcgcagaaagaagaacatggtaggtgcagtgagtgctgcggaggggcgcagaggcccgcgccctggctggccctgtgcatgctgccttgcgccctgctcccaggtgctcactaacccgtaatctggctctgtgtgcatgtgctgcccggcagggctgtcgtgtgcgtgttgggtgggaaggcggaggcggcgcggggcgggctggcctctgagcatctggctgcatttagcacg

SEQ ID NO: 249 - DNA, 505 bp, Artificial Sequence
  Synthetic
gagcctcctgcccctcaccaggccctgttagcatcacctcgggcacctggccacagcaggggccagtcagggcaccccgggatagcacgcccaggccctgtgcaaggcctctggcacttaggagaggcttttgcccctttgtcctctgagcagaagggttggcaaagagggaaggggacaggccagttctgcacctggcctttctccagaatgaaggcctccaccacccgtccttccccacagaaagaaaagtaaactgttttcgcggctgcgcagaaagaagaacatggtaggtgcagtgagtgctgcggaggggcgcagaggcccgcgccctggctggccctgtgcatgctgccttgcgccctgctcccaggtgctcactaacccgtaatctgctgctctgtgtgcagtgctgcccggcagggctgtcgtgtgcgtgttgggtgggaaggcggaggcggcgcggggcgggctggcctctgagcatctggctgcatttagcacg

SEQ ID NO: 250 - DNA, 506 bp, Artificial Sequence
  Synthetic
gagcctcctgcccctcaccaggccctgttagcatcacctcgggcacctggccacagcaggggccagtcagggcaccccgggatagcacgcccaggccctgtgcaaggcctctggcacttaggagaggcttttgcccctttgtcctctgagcagaagggttggcaaagagggaaggggacaggccagttctgcacctggcctttctccagaatgaaggcctccaccacccgtccttccccacagaaagaaaagtaaactgttttcgcggctgcgcagaaagaagaacatggtaggtgcagtgagtgctgcggaggggcgcagaggcccgcgccctggctggccctgtgcatgctgccttgcgccctgctcccaggtgctcactaacccgtaatctgctgctctgtgtgcatgtgctgcccggcagggctgtcgtgtgcgtgttgggtgggaaggcggaggcggcgcggggcgggctggcctctgagcatctggctgcatttagcacg

SEQ ID NO: 251 - DNA, 501 bp, Artificial Sequence
  Synthetic
gagcctcctgcccctcaccaggccctgttagcatcacctcgggcacctggccacagcaggggccagtcagggcaccccgggatagcacgcccaggccctgtgcaaggcctctggcacttaggagaggcttttgcccctttgtcctctgagcagaagggttggcaaagagggaaggggacaggccagttctgcacctggcctttctccagaatgaaggcctccaccacccgtccttccccacagaaagaaaagtaaactgttttcgcggctgcgcagaaagaagaacatggtatgtgcagtgagtgctgcggaggggcgcagaggcccgcgccctggctggccctgtgcatgcgccttgcgccctgctcccaggtgccactaacccgtaatctggctctgtgtgcagtgctgcccggcagggctgtcgtgtgcgtgttgggtgggaaggcggaggcggcgcggggcgggctggcctctgagcatctggctgcatttagcacg

SEQ ID NO: 252 - DNA, 502 bp, Artificial Sequence
  Synthetic
gagcctcctgcccctcaccaggccctgttagcatcacctcgggcacctggccacagcaggggccagtcagggcaccccgggatagcacgcccaggccctgtgcaaggcctctggcacttaggagaggcttttgcccctttgtcctctgagcagaagggttggcaaagagggaaggggacaggccagttctgcacctggcctttctccagaatgaaggcctccaccacccgtccttccccacagaaagaaaagtaaactgttttcgcggctgcgcagaaagaagaacatggtatgtgcagtgagtgctgcggaggggcgcagaggcccgcgccctggctggccctgtgcatgcgccttgcgccctgctcccaggtgccactaacccgtaatctggctctgtgtgcatgtgctgcccggcagggctgtcgtgtgcgtgttgggtgggaaggcggaggcggcgcggggcgggctggcctctgagcatctggctgcatttagcacg

SEQ ID NO: 253 - DNA, 503 bp, Artificial Sequence
  Synthetic
gagcctcctgcccctcaccaggccctgttagcatcacctcgggcacctggccacagcaggggccagtcagggcaccccgggatagcacgcccaggccctgtgcaaggcctctggcacttaggagaggcttttgcccctttgtcctctgagcagaagggttggcaaagagggaaggggacaggccagttctgcacctggcctttctccagaatgaaggcctccaccacccgtccttccccacagaaagaaaagtaaactgttttcgcggctgcgcagaaagaagaacatggtatgtgcagtgagtgctgcggaggggcgcagaggcccgcgccctggctggccctgtgcatgcgccttgcgccctgctcccaggtgccactaacccgtaatctgctgctctgtgtgcagtgctgcccggcagggctgtcgtgtgcgtgttgggtgggaaggcggaggcggcgcggggcgggctggcctctgagcatctggctgcatttagcacg

SEQ ID NO: 254 - DNA, 504 bp, Artificial Sequence
  Synthetic
gagcctcctgcccctcaccaggccctgttagcatcacctcgggcacctggccacagcaggggccagtcagggcaccccgggatagcacgcccaggccctgtgcaaggcctctggcacttaggagaggcttttgcccctttgtcctctgagcagaagggttggcaaagagggaaggggacaggccagttctgcacctggcctttctccagaatgaaggcctccaccacccgtccttccccacagaaagaaaagtaaactgttttcgcggctgcgcagaaagaagaacatggtatgtgcagtgagtgctgcggaggggcgcagaggcccgcgccctggctggccctgtgcatgcgccttgcgccctgctcccaggtgccactaacccgtaatctgctgctctgtgtgcatgtgctgcccggcagggctgtcgtgtgcgtgttgggtgggaaggcggaggcggcgcggggcgggctggcctctgagcatctggctgcatttagcacg

SEQ ID NO: 255 - DNA, 502 bp, Artificial Sequence
  Synthetic
gagcctcctgcccctcaccaggccctgttagcatcacctcgggcacctggccacagcaggggccagtcagggcaccccgggatagcacgcccaggccctgtgcaaggcctctggcacttaggagaggcttttgcccctttgtcctctgagcagaagggttggcaaagagggaaggggacaggccagttctgcacctggcctttctccagaatgaaggcctccaccacccgtccttccccacagaaagaaaagtaaactgttttcgcggctgcgcagaaagaagaacatggtatgtgcagtgagtgctgcggaggggcgcagaggcccgcgccctggctggccctgtgcatgcgccttgcgccctgctcccaggtgctcactaacccgtaatctggctctgtgtgcagtgctgcccggcagggctgtcgtgtgcgtgttgggtgggaaggcggaggcggcgcggggcgggctggcctctgagcatctggctgcatttagcacg

SEQ ID NO: 256 - DNA, 503 bp, Artificial Sequence
  Synthetic
gagcctcctgcccctcaccaggccctgttagcatcacctcgggcacctggccacagcaggggccagtcagggcaccccgggatagcacgcccaggccctgtgcaaggcctctggcacttaggagaggcttttgcccctttgtcctctgagcagaagggttggcaaagagggaaggggacaggccagttctgcacctggcctttctccagaatgaaggcctccaccacccgtccttccccacagaaagaaaagtaaactgttttcgcggctgcgcagaaagaagaacatggtatgtgcagtgagtgctgcggaggggcgcagaggcccgcgccctggctggccctgtgcatgcgccttgcgccctgctcccaggtgctcactaacccgtaatctggctctgtgtgcatgtgctgcccggcagggctgtcgtgtgcgtgttgggtgggaaggcggaggcggcgcggggcgggctggcctctgagcatctggctgcatttagcacg

SEQ ID NO: 257 - DNA, 504 bp, Artificial Sequence
  Synthetic
gagcctcctgcccctcaccaggccctgttagcatcacctcgggcacctggccacagcaggggccagtcagggcaccccgggatagcacgcccaggccctgtgcaaggcctctggcacttaggagaggcttttgcccctttgtcctctgagcagaagggttggcaaagagggaaggggacaggccagttctgcacctggcctttctccagaatgaaggcctccaccacccgtccttccccacagaaagaaaagtaaactgttttcgcggctgcgcagaaagaagaacatggtatgtgcagtgagtgctgcggaggggcgcagaggcccgcgccctggctggccctgtgcatgcgccttgcgccctgctcccaggtgctcactaacccgtaatctgctgctctgtgtgcagtgctgcccggcagggctgtcgtgtgcgtgttgggtgggaaggcggaggcggcgcggggcgggctggcctctgagcatctggctgcatttagcacg

SEQ ID NO: 258 - DNA, 505 bp, Artificial Sequence
  Synthetic
gagcctcctgcccctcaccaggccctgttagcatcacctcgggcacctggccacagcaggggccagtcagggcaccccgggatagcacgcccaggccctgtgcaaggcctctggcacttaggagaggcttttgcccctttgtcctctgagcagaagggttggcaaagagggaaggggacaggccagttctgcacctggcctttctccagaatgaaggcctccaccacccgtccttccccacagaaagaaaagtaaactgttttcgcggctgcgcagaaagaagaacatggtatgtgcagtgagtgctgcggaggggcgcagaggcccgcgccctggctggccctgtgcatgcgccttgcgccctgctcccaggtgctcactaacccgtaatctgctgctctgtgtgcatgtgctgcccggcagggctgtcgtgtgcgtgttgggtgggaaggcggaggcggcgcggggcgggctggcctctgagcatctggctgcatttagcacg

SEQ ID NO: 259 - DNA, 502 bp, Artificial Sequence
  Synthetic
gagcctcctgcccctcaccaggccctgttagcatcacctcgggcacctggccacagcaggggccagtcagggcaccccgggatagcacgcccaggccctgtgcaaggcctctggcacttaggagaggcttttgcccctttgtcctctgagcagaagggttggcaaagagggaaggggacaggccagttctgcacctggcctttctccagaatgaaggcctccaccacccgtccttccccacagaaagaaaagtaaactgttttcgcggctgcgcagaaagaagaacatggtatgtgcagtgagtgctgcggaggggcgcagaggcccgcgccctggctggccctgtgcatgctgccttgcgccctgctcccaggtgccactaacccgtaatctggctctgtgtgcagtgctgcccggcagggctgtcgtgtgcgtgttgggtgggaaggcggaggcggcgcggggcgggctggcctctgagcatctggctgcatttagcacg

SEQ ID NO: 260 - DNA, 503 bp, Artificial Sequence
  Synthetic
gagcctcctgcccctcaccaggccctgttagcatcacctcgggcacctggccacagcaggggccagtcagggcaccccgggatagcacgcccaggccctgtgcaaggcctctggcacttaggagaggcttttgcccctttgtcctctgagcagaagggttggcaaagagggaaggggacaggccagttctgcacctggcctttctccagaatgaaggcctccaccacccgtccttccccacagaaagaaaagtaaactgttttcgcggctgcgcagaaagaagaacatggtatgtgcagtgagtgctgcggaggggcgcagaggcccgcgccctggctggccctgtgcatgctgccttgcgccctgctcccaggtgccactaacccgtaatctggctctgtgtgcatgtgctgcccggcagggctgtcgtgtgcgtgttgggtgggaaggcggaggcggcgcggggcgggctggcctctgagcatctggctgcatttagcacg

SEQ ID NO: 261 - DNA, 504 bp, Artificial Sequence
  Synthetic
gagcctcctgcccctcaccaggccctgttagcatcacctcgggcacctggccacagcaggggccagtcagggcaccccgggatagcacgcccaggccctgtgcaaggcctctggcacttaggagaggcttttgcccctttgtcctctgagcagaagggttggcaaagagggaaggggacaggccagttctgcacctggcctttctccagaatgaaggcctccaccacccgtccttccccacagaaagaaaagtaaactgttttcgcggctgcgcagaaagaagaacatggtatgtgcagtgagtgctgcggaggggcgcagaggcccgcgccctggctggccctgtgcatgctgccttgcgccctgctcccaggtgccactaacccgtaatctgctgctctgtgtgcagtgctgcccggcagggctgtcgtgtgcgtgttgggtgggaaggcggaggcggcgcggggcgggctggcctctgagcatctggctgcatttagcacg

SEQ ID NO: 262 - DNA, 505 bp, Artificial Sequence
  Synthetic
gagcctcctgcccctcaccaggccctgttagcatcacctcgggcacctggccacagcaggggccagtcagggcaccccgggatagcacgcccaggccctgtgcaaggcctctggcacttaggagaggcttttgcccctttgtcctctgagcagaagggttggcaaagagggaaggggacaggccagttctgcacctggcctttctccagaatgaaggcctccaccacccgtccttccccacagaaagaaaagtaaactgttttcgcggctgcgcagaaagaagaacatggtatgtgcagtgagtgctgcggaggggcgcagaggcccgcgccctggctggccctgtgcatgctgccttgcgccctgctcccaggtgccactaacccgtaatctgctgctctgtgtgcatgtgctgcccggcagggctgtcgtgtgcgtgttgggtgggaaggcggaggcggcgcggggcgggctggcctctgagcatctggctgcatttagcacg

SEQ ID NO: 263 - DNA, 503 bp, Artificial Sequence
  Synthetic
gagcctcctgcccctcaccaggccctgttagcatcacctcgggcacctggccacagcaggggccagtcagggcaccccgggatagcacgcccaggccctgtgcaaggcctctggcacttaggagaggcttttgcccctttgtcctctgagcagaagggttggcaaagagggaaggggacaggccagttctgcacctggcctttctccagaatgaaggcctccaccacccgtccttccccacagaaagaaaagtaaactgttttcgcggctgcgcagaaagaagaacatggtatgtgcagtgagtgctgcggaggggcgcagaggcccgcgccctggctggccctgtgcatgctgccttgcgccctgctcccaggtgctcactaacccgtaatctggctctgtgtgcagtgctgcccggcagggctgtcgtgtgcgtgttgggtgggaaggcggaggcggcgcggggcgggctggcctctgagcatctggctgcatttagcacg

SEQ ID NO: 264 - DNA, 504 bp, Artificial Sequence
  Synthetic
gagcctcctgcccctcaccaggccctgttagcatcacctcgggcacctggccacagcaggggccagtcagggcaccccgggatagcacgcccaggccctgtgcaaggcctctggcacttaggagaggcttttgcccctttgtcctctgagcagaagggttggcaaagagggaaggggacaggccagttctgcacctggcctttctccagaatgaaggcctccaccacccgtccttccccacagaaagaaaagtaaactgttttcgcggctgcgcagaaagaagaacatggtatgtgcagtgagtgctgcggaggggcgcagaggcccgcgccctggctggccctgtgcatgctgccttgcgccctgctcccaggtgctcactaacccgtaatctggctctgtgtgcatgtgctgcccggcagggctgtcgtgtgcgtgttgggtgggaaggcggaggcggcgcggggcgggctggcctctgagcatctggctgcatttagcacg

SEQ ID NO: 265 - DNA, 505 bp, Artificial Sequence
  Synthetic
gagcctcctgcccctcaccaggccctgttagcatcacctcgggcacctggccacagcaggggccagtcagggcaccccgggatagcacgcccaggccctgtgcaaggcctctggcacttaggagaggcttttgcccctttgtcctctgagcagaagggttggcaaagagggaaggggacaggccagttctgcacctggcctttctccagaatgaaggcctccaccacccgtccttccccacagaaagaaaagtaaactgttttcgcggctgcgcagaaagaagaacatggtatgtgcagtgagtgctgcggaggggcgcagaggcccgcgccctggctggccctgtgcatgctgccttgcgccctgctcccaggtgctcactaacccgtaatctgctgctctgtgtgcagtgctgcccggcagggctgtcgtgtgcgtgttgggtgggaaggcggaggcggcgcggggcgggctggcctctgagcatctggctgcatttagcacg

SEQ ID NO: 266 - DNA, 506 bp, Artificial Sequence
  Synthetic
gagcctcctgcccctcaccaggccctgttagcatcacctcgggcacctggccacagcaggggccagtcagggcaccccgggatagcacgcccaggccctgtgcaaggcctctggcacttaggagaggcttttgcccctttgtcctctgagcagaagggttggcaaagagggaaggggacaggccagttctgcacctggcctttctccagaatgaaggcctccaccacccgtccttccccacagaaagaaaagtaaactgttttcgcggctgcgcagaaagaagaacatggtatgtgcagtgagtgctgcggaggggcgcagaggcccgcgccctggctggccctgtgcatgctgccttgcgccctgctcccaggtgctcactaacccgtaatctgctgctctgtgtgcatgtgctgcccggcagggctgtcgtgtgcgtgttgggtgggaaggcggaggcggcgcggggcgggctggcctctgagcatctggctgcatttagcacg

SEQ ID NO: 267 - DNA, 501 bp, Artificial Sequence
  Synthetic
gagcctcctgcccctcaccaggccctgttagcatcacctcgggcacctggccacagcaggggccagtcagggcaccccgggatagcacgcccaggccctgtgcaaggcctctggcacttaggagaggcttttgcccctttgtcctctgagcagaagggttggcaaagagggaaggggacaggccagttctgcacctggcctttctccagaatgaaggcctccaccacccgtccttccccacagaaagaaaagtaaactgttttcgcggctgcgcagaaagaagaacatggtacgagcagtgagtgctgcggaggggcgcagaggcccgcgccctggctggccctgtgcatgcgccttgcgccctgctcccaggtgccactaacccgtaatctggctctgtgtgcagtgctgcccggcagggctgtcgtgtgcgtgttgggtgggaaggcggaggcggcgcggggcgggctggcctctgagcatctggctgcatttagcacg

SEQ ID NO: 268 - DNA, 502 bp, Artificial Sequence
  Synthetic
gagcctcctgcccctcaccaggccctgttagcatcacctcgggcacctggccacagcaggggccagtcagggcaccccgggatagcacgcccaggccctgtgcaaggcctctggcacttaggagaggcttttgcccctttgtcctctgagcagaagggttggcaaagagggaaggggacaggccagttctgcacctggcctttctccagaatgaaggcctccaccacccgtccttccccacagaaagaaaagtaaactgttttcgcggctgcgcagaaagaagaacatggtacgagcagtgagtgctgcggaggggcgcagaggcccgcgccctggctggccctgtgcatgcgccttgcgccctgctcccaggtgccactaacccgtaatctggctctgtgtgcatgtgctgcccggcagggctgtcgtgtgcgtgttgggtgggaaggcggaggcggcgcggggcgggctggcctctgagcatctggctgcatttagcacg

SEQ ID NO: 269 - DNA, 503 bp, Artificial Sequence
  Synthetic
gagcctcctgcccctcaccaggccctgttagcatcacctcgggcacctggccacagcaggggccagtcagggcaccccgggatagcacgcccaggccctgtgcaaggcctctggcacttaggagaggcttttgcccctttgtcctctgagcagaagggttggcaaagagggaaggggacaggccagttctgcacctggcctttctccagaatgaaggcctccaccacccgtccttccccacagaaagaaaagtaaactgttttcgcggctgcgcagaaagaagaacatggtacgagcagtgagtgctgcggaggggcgcagaggcccgcgccctggctggccctgtgcatgcgccttgcgccctgctcccaggtgccactaacccgtaatctgctgctctgtgtgcagtgctgcccggcagggctgtcgtgtgcgtgttgggtgggaaggcggaggcggcgcggggcgggctggcctctgagcatctggctgcatttagcacg

SEQ ID NO: 270 - DNA, 504 bp, Artificial Sequence
  Synthetic
gagcctcctgcccctcaccaggccctgttagcatcacctcgggcacctggccacagcaggggccagtcagggcaccccgggatagcacgcccaggccctgtgcaaggcctctggcacttaggagaggcttttgcccctttgtcctctgagcagaagggttggcaaagagggaaggggacaggccagttctgcacctggcctttctccagaatgaaggcctccaccacccgtccttccccacagaaagaaaagtaaactgttttcgcggctgcgcagaaagaagaacatggtacgagcagtgagtgctgcggaggggcgcagaggcccgcgccctggctggccctgtgcatgcgccttgcgccctgctcccaggtgccactaacccgtaatctgctgctctgtgtgcatgtgctgcccggcagggctgtcgtgtgcgtgttgggtgggaaggcggaggcggcgcggggcgggctggcctctgagcatctggctgcatttagcacg

SEQ ID NO: 271 - DNA, 502 bp, Artificial Sequence
  Synthetic
gagcctcctgcccctcaccaggccctgttagcatcacctcgggcacctggccacagcaggggccagtcagggcaccccgggatagcacgcccaggccctgtgcaaggcctctggcacttaggagaggcttttgcccctttgtcctctgagcagaagggttggcaaagagggaaggggacaggccagttctgcacctggcctttctccagaatgaaggcctccaccacccgtccttccccacagaaagaaaagtaaactgttttcgcggctgcgcagaaagaagaacatggtacgagcagtgagtgctgcggaggggcgcagaggcccgcgccctggctggccctgtgcatgcgccttgcgccctgctcccaggtgctcactaacccgtaatctggctctgtgtgcagtgctgcccggcagggctgtcgtgtgcgtgttgggtgggaaggcggaggcggcgcggggcgggctggcctctgagcatctggctgcatttagcacg

SEQ ID NO: 272 - DNA, 503 bp, Artificial Sequence
  Synthetic
gagcctcctgcccctcaccaggccctgttagcatcacctcgggcacctggccacagcaggggccagtcagggcaccccgggatagcacgcccaggccctgtgcaaggcctctggcacttaggagaggcttttgcccctttgtcctctgagcagaagggttggcaaagagggaaggggacaggccagttctgcacctggcctttctccagaatgaaggcctccaccacccgtccttccccacagaaagaaaagtaaactgttttcgcggctgcgcagaaagaagaacatggtacgagcagtgagtgctgcggaggggcgcagaggcccgcgccctggctggccctgtgcatgcgccttgcgccctgctcccaggtgctcactaacccgtaatctggctctgtgtgcatgtgctgcccggcagggctgtcgtgtgcgtgttgggtgggaaggcggaggcggcgcggggcgggctggcctctgagcatctggctgcatttagcacg

SEQ ID NO: 273 - DNA, 504 bp, Artificial Sequence
  Synthetic
gagcctcctgcccctcaccaggccctgttagcatcacctcgggcacctggccacagcaggggccagtcagggcaccccgggatagcacgcccaggccctgtgcaaggcctctggcacttaggagaggcttttgcccctttgtcctctgagcagaagggttggcaaagagggaaggggacaggccagttctgcacctggcctttctccagaatgaaggcctccaccacccgtccttccccacagaaagaaaagtaaactgttttcgcggctgcgcagaaagaagaacatggtacgagcagtgagtgctgcggaggggcgcagaggcccgcgccctggctggccctgtgcatgcgccttgcgccctgctcccaggtgctcactaacccgtaatctgctgctctgtgtgcagtgctgcccggcagggctgtcgtgtgcgtgttgggtgggaaggcggaggcggcgcggggcgggctggcctctgagcatctggctgcatttagcacg

SEQ ID NO: 274 - DNA, 505 bp, Artificial Sequence
  Synthetic
gagcctcctgcccctcaccaggccctgttagcatcacctcgggcacctggccacagcaggggccagtcagggcaccccgggatagcacgcccaggccctgtgcaaggcctctggcacttaggagaggcttttgcccctttgtcctctgagcagaagggttggcaaagagggaaggggacaggccagttctgcacctggcctttctccagaatgaaggcctccaccacccgtccttccccacagaaagaaaagtaaactgttttcgcggctgcgcagaaagaagaacatggtacgagcagtgagtgctgcggaggggcgcagaggcccgcgccctggctggccctgtgcatgcgccttgcgccctgctcccaggtgctcactaacccgtaatctgctgctctgtgtgcatgtgctgcccggcagggctgtcgtgtgcgtgttgggtgggaaggcggaggcggcgcggggcgggctggcctctgagcatctggctgcatttagcacg

SEQ ID NO: 275 - DNA, 502 bp, Artificial Sequence
  Synthetic
gagcctcctgcccctcaccaggccctgttagcatcacctcgggcacctggccacagcaggggccagtcagggcaccccgggatagcacgcccaggccctgtgcaaggcctctggcacttaggagaggcttttgcccctttgtcctctgagcagaagggttggcaaagagggaaggggacaggccagttctgcacctggcctttctccagaatgaaggcctccaccacccgtccttccccacagaaagaaaagtaaactgttttcgcggctgcgcagaaagaagaacatggtacgagcagtgagtgctgcggaggggcgcagaggcccgcgccctggctggccctgtgcatgctgccttgcgccctgctcccaggtgccactaacccgtaatctggctctgtgtgcagtgctgcccggcagggctgtcgtgtgcgtgttgggtgggaaggcggaggcggcgcggggcgggctggcctctgagcatctggctgcatttagcacg

SEQ ID NO: 276 - DNA, 503 bp, Artificial Sequence
  Synthetic
gagcctcctgcccctcaccaggccctgttagcatcacctcgggcacctggccacagcaggggccagtcagggcaccccgggatagcacgcccaggccctgtgcaaggcctctggcacttaggagaggcttttgcccctttgtcctctgagcagaagggttggcaaagagggaaggggacaggccagttctgcacctggcctttctccagaatgaaggcctccaccacccgtccttccccacagaaagaaaagtaaactgttttcgcggctgcgcagaaagaagaacatggtacgagcagtgagtgctgcggaggggcgcagaggcccgcgccctggctggccctgtgcatgctgccttgcgccctgctcccaggtgccactaacccgtaatctggctctgtgtgcatgtgctgcccggcagggctgtcgtgtgcgtgttgggtgggaaggcggaggcggcgcggggcgggctggcctctgagcatctggctgcatttagcacg

SEQ ID NO: 277 - DNA, 504 bp, Artificial Sequence
  Synthetic
gagcctcctgcccctcaccaggccctgttagcatcacctcgggcacctggccacagcaggggccagtcagggcaccccgggatagcacgcccaggccctgtgcaaggcctctggcacttaggagaggcttttgcccctttgtcctctgagcagaagggttggcaaagagggaaggggacaggccagttctgcacctggcctttctccagaatgaaggcctccaccacccgtccttccccacagaaagaaaagtaaactgttttcgcggctgcgcagaaagaagaacatggtacgagcagtgagtgctgcggaggggcgcagaggcccgcgccctggctggccctgtgcatgctgccttgcgccctgctcccaggtgccactaacccgtaatctgctgctctgtgtgcagtgctgcccggcagggctgtcgtgtgcgtgttgggtgggaaggcggaggcggcgcggggcgggctggcctctgagcatctggctgcatttagcacg

SEQ ID NO: 278 - DNA, 505 bp, Artificial Sequence
  Synthetic
gagcctcctgcccctcaccaggccctgttagcatcacctcgggcacctggccacagcaggggccagtcagggcaccccgggatagcacgcccaggccctgtgcaaggcctctggcacttaggagaggcttttgcccctttgtcctctgagcagaagggttggcaaagagggaaggggacaggccagttctgcacctggcctttctccagaatgaaggcctccaccacccgtccttccccacagaaagaaaagtaaactgttttcgcggctgcgcagaaagaagaacatggtacgagcagtgagtgctgcggaggggcgcagaggcccgcgccctggctggccctgtgcatgctgccttgcgccctgctcccaggtgccactaacccgtaatctgctgctctgtgtgcatgtgctgcccggcagggctgtcgtgtgcgtgttgggtgggaaggcggaggcggcgcggggcgggctggcctctgagcatctggctgcatttagcacg

SEQ ID NO: 279 - DNA, 503 bp, Artificial Sequence
  Synthetic
gagcctcctgcccctcaccaggccctgttagcatcacctcgggcacctggccacagcaggggccagtcagggcaccccgggatagcacgcccaggccctgtgcaaggcctctggcacttaggagaggcttttgcccctttgtcctctgagcagaagggttggcaaagagggaaggggacaggccagttctgcacctggcctttctccagaatgaaggcctccaccacccgtccttccccacagaaagaaaagtaaactgttttcgcggctgcgcagaaagaagaacatggtacgagcagtgagtgctgcggaggggcgcagaggcccgcgccctggctggccctgtgcatgctgccttgcgccctgctcccaggtgctcactaacccgtaatctggctctgtgtgcagtgctgcccggcagggctgtcgtgtgcgtgttgggtgggaaggcggaggcggcgcggggcgggctggcctctgagcatctggctgcatttagcacg

SEQ ID NO: 280 - DNA, 504 bp, Artificial Sequence
  Synthetic
gagcctcctgcccctcaccaggccctgttagcatcacctcgggcacctggccacagcaggggccagtcagggcaccccgggatagcacgcccaggccctgtgcaaggcctctggcacttaggagaggcttttgcccctttgtcctctgagcagaagggttggcaaagagggaaggggacaggccagttctgcacctggcctttctccagaatgaaggcctccaccacccgtccttccccacagaaagaaaagtaaactgttttcgcggctgcgcagaaagaagaacatggtacgagcagtgagtgctgcggaggggcgcagaggcccgcgccctggctggccctgtgcatgctgccttgcgccctgctcccaggtgctcactaacccgtaatctggctctgtgtgcatgtgctgcccggcagggctgtcgtgtgcgtgttgggtgggaaggcggaggcggcgcggggcgggctggcctctgagcatctggctgcatttagcacg

SEQ ID NO: 281 - DNA, 505 bp, Artificial Sequence
  Synthetic
gagcctcctgcccctcaccaggccctgttagcatcacctcgggcacctggccacagcaggggccagtcagggcaccccgggatagcacgcccaggccctgtgcaaggcctctggcacttaggagaggcttttgcccctttgtcctctgagcagaagggttggcaaagagggaaggggacaggccagttctgcacctggcctttctccagaatgaaggcctccaccacccgtccttccccacagaaagaaaagtaaactgttttcgcggctgcgcagaaagaagaacatggtacgagcagtgagtgctgcggaggggcgcagaggcccgcgccctggctggccctgtgcatgctgccttgcgccctgctcccaggtgctcactaacccgtaatctgctgctctgtgtgcagtgctgcccggcagggctgtcgtgtgcgtgttgggtgggaaggcggaggcggcgcggggcgggctggcctctgagcatctggctgcatttagcacg

SEQ ID NO: 282 - DNA, 506 bp, Artificial Sequence
  Synthetic
gagcctcctgcccctcaccaggccctgttagcatcacctcgggcacctggccacagcaggggccagtcagggcaccccgggatagcacgcccaggccctgtgcaaggcctctggcacttaggagaggcttttgcccctttgtcctctgagcagaagggttggcaaagagggaaggggacaggccagttctgcacctggcctttctccagaatgaaggcctccaccacccgtccttccccacagaaagaaaagtaaactgttttcgcggctgcgcagaaagaagaacatggtacgagcagtgagtgctgcggaggggcgcagaggcccgcgccctggctggccctgtgcatgctgccttgcgccctgctcccaggtgctcactaacccgtaatctgctgctctgtgtgcatgtgctgcccggcagggctgtcgtgtgcgtgttgggtgggaaggcggaggcggcgcggggcgggctggcctctgagcatctggctgcatttagcacg

SEQ ID NO: 283 - DNA, 501 bp, Artificial Sequence
  Synthetic
gagcctcctgcccctcaccaggccctgttagcatcacctcgggcacctggccacagcaggggccagtcagggcaccccgggatagcacgcccaggccctgtgcaaggcctctggcacttaggagaggcttttgcccctttgtcctctgagcagaagggttggcaaagagggaaggggacaggccagttctgcacctggcctttctccagaatgaaggcctccaccacccgtccttccccacagaaagaaaagtaaactgttttcgcggctgcgcagaaagaagaacatggttcgtgcagtgagtgctgcggaggggcgcagaggcccgcgccctggctggccctgtgcatgcgccttgcgccctgctcccaggtgccactaacccgtaatctggctctgtgtgcagtgctgcccggcagggctgtcgtgtgcgtgttgggtgggaaggcggaggcggcgcggggcgggctggcctctgagcatctggctgcatttagcacg

SEQ ID NO: 284 - DNA, 502 bp, Artificial Sequence
  Synthetic
gagcctcctgcccctcaccaggccctgttagcatcacctcgggcacctggccacagcaggggccagtcagggcaccccgggatagcacgcccaggccctgtgcaaggcctctggcacttaggagaggcttttgcccctttgtcctctgagcagaagggttggcaaagagggaaggggacaggccagttctgcacctggcctttctccagaatgaaggcctccaccacccgtccttccccacagaaagaaaagtaaactgttttcgcggctgcgcagaaagaagaacatggttcgtgcagtgagtgctgcggaggggcgcagaggcccgcgccctggctggccctgtgcatgcgccttgcgccctgctcccaggtgccactaacccgtaatctggctctgtgtgcatgtgctgcccggcagggctgtcgtgtgcgtgttgggtgggaaggcggaggcggcgcggggcgggctggcctctgagcatctggctgcatttagcacg

SEQ ID NO: 285 - DNA, 503 bp, Artificial Sequence
  Synthetic
gagcctcctgcccctcaccaggccctgttagcatcacctcgggcacctggccacagcaggggccagtcagggcaccccgggatagcacgcccaggccctgtgcaaggcctctggcacttaggagaggcttttgcccctttgtcctctgagcagaagggttggcaaagagggaaggggacaggccagttctgcacctggcctttctccagaatgaaggcctccaccacccgtccttccccacagaaagaaaagtaaactgttttcgcggctgcgcagaaagaagaacatggttcgtgcagtgagtgctgcggaggggcgcagaggcccgcgccctggctggccctgtgcatgcgccttgcgccctgctcccaggtgccactaacccgtaatctgctgctctgtgtgcagtgctgcccggcagggctgtcgtgtgcgtgttgggtgggaaggcggaggcggcgcggggcgggctggcctctgagcatctggctgcatttagcacg

SEQ ID NO: 286 - DNA, 504 bp, Artificial Sequence
  Synthetic
gagcctcctgcccctcaccaggccctgttagcatcacctcgggcacctggccacagcaggggccagtcagggcaccccgggatagcacgcccaggccctgtgcaaggcctctggcacttaggagaggcttttgcccctttgtcctctgagcagaagggttggcaaagagggaaggggacaggccagttctgcacctggcctttctccagaatgaaggcctccaccacccgtccttccccacagaaagaaaagtaaactgttttcgcggctgcgcagaaagaagaacatggttcgtgcagtgagtgctgcggaggggcgcagaggcccgcgccctggctggccctgtgcatgcgccttgcgccctgctcccaggtgccactaacccgtaatctgctgctctgtgtgcatgtgctgcccggcagggctgtcgtgtgcgtgttgggtgggaaggcggaggcggcgcggggcgggctggcctctgagcatctggctgcatttagcacg

SEQ ID NO: 287 - DNA, 502 bp, Artificial Sequence
  Synthetic
gagcctcctgcccctcaccaggccctgttagcatcacctcgggcacctggccacagcaggggccagtcagggcaccccgggatagcacgcccaggccctgtgcaaggcctctggcacttaggagaggcttttgcccctttgtcctctgagcagaagggttggcaaagagggaaggggacaggccagttctgcacctggcctttctccagaatgaaggcctccaccacccgtccttccccacagaaagaaaagtaaactgttttcgcggctgcgcagaaagaagaacatggttcgtgcagtgagtgctgcggaggggcgcagaggcccgcgccctggctggccctgtgcatgcgccttgcgccctgctcccaggtgctcactaacccgtaatctggctctgtgtgcagtgctgcccggcagggctgtcgtgtgcgtgttgggtgggaaggcggaggcggcgcggggcgggctggcctctgagcatctggctgcatttagcacg

SEQ ID NO: 288 - DNA, 503 bp, Artificial Sequence
  Synthetic
gagcctcctgcccctcaccaggccctgttagcatcacctcgggcacctggccacagcaggggccagtcagggcaccccgggatagcacgcccaggccctgtgcaaggcctctggcacttaggagaggcttttgcccctttgtcctctgagcagaagggttggcaaagagggaaggggacaggccagttctgcacctggcctttctccagaatgaaggcctccaccacccgtccttccccacagaaagaaaagtaaactgttttcgcggctgcgcagaaagaagaacatggttcgtgcagtgagtgctgcggaggggcgcagaggcccgcgccctggctggccctgtgcatgcgccttgcgccctgctcccaggtgctcactaacccgtaatctggctctgtgtgcatgtgctgcccggcagggctgtcgtgtgcgtgttgggtgggaaggcggaggcggcgcggggcgggctggcctctgagcatctggctgcatttagcacg

SEQ ID NO: 289 - DNA, 504 bp, Artificial Sequence
  Synthetic
gagcctcctgcccctcaccaggccctgttagcatcacctcgggcacctggccacagcaggggccagtcagggcaccccgggatagcacgcccaggccctgtgcaaggcctctggcacttaggagaggcttttgcccctttgtcctctgagcagaagggttggcaaagagggaaggggacaggccagttctgcacctggcctttctccagaatgaaggcctccaccacccgtccttccccacagaaagaaaagtaaactgttttcgcggctgcgcagaaagaagaacatggttcgtgcagtgagtgctgcggaggggcgcagaggcccgcgccctggctggccctgtgcatgcgccttgcgccctgctcccaggtgctcactaacccgtaatctgctgctctgtgtgcagtgctgcccggcagggctgtcgtgtgcgtgttgggtgggaaggcggaggcggcgcggggcgggctggcctctgagcatctggctgcatttagcacg

SEQ ID NO: 290 - DNA, 505 bp, Artificial Sequence
  Synthetic
gagcctcctgcccctcaccaggccctgttagcatcacctcgggcacctggccacagcaggggccagtcagggcaccccgggatagcacgcccaggccctgtgcaaggcctctggcacttaggagaggcttttgcccctttgtcctctgagcagaagggttggcaaagagggaaggggacaggccagttctgcacctggcctttctccagaatgaaggcctccaccacccgtccttccccacagaaagaaaagtaaactgttttcgcggctgcgcagaaagaagaacatggttcgtgcagtgagtgctgcggaggggcgcagaggcccgcgccctggctggccctgtgcatgcgccttgcgccctgctcccaggtgctcactaacccgtaatctgctgctctgtgtgcatgtgctgcccggcagggctgtcgtgtgcgtgttgggtgggaaggcggaggcggcgcggggcgggctggcctctgagcatctggctgcatttagcacg

SEQ ID NO: 291 - DNA, 502 bp, Artificial Sequence
  Synthetic
gagcctcctgcccctcaccaggccctgttagcatcacctcgggcacctggccacagcaggggccagtcagggcaccccgggatagcacgcccaggccctgtgcaaggcctctggcacttaggagaggcttttgcccctttgtcctctgagcagaagggttggcaaagagggaaggggacaggccagttctgcacctggcctttctccagaatgaaggcctccaccacccgtccttccccacagaaagaaaagtaaactgttttcgcggctgcgcagaaagaagaacatggttcgtgcagtgagtgctgcggaggggcgcagaggcccgcgccctggctggccctgtgcatgctgccttgcgccctgctcccaggtgccactaacccgtaatctggctctgtgtgcagtgctgcccggcagggctgtcgtgtgcgtgttgggtgggaaggcggaggcggcgcggggcgggctggcctctgagcatctggctgcatttagcacg

SEQ ID NO: 292 - DNA, 503 bp, Artificial Sequence
  Synthetic
gagcctcctgcccctcaccaggccctgttagcatcacctcgggcacctggccacagcaggggccagtcagggcaccccgggatagcacgcccaggccctgtgcaaggcctctggcacttaggagaggcttttgcccctttgtcctctgagcagaagggttggcaaagagggaaggggacaggccagttctgcacctggcctttctccagaatgaaggcctccaccacccgtccttccccacagaaagaaaagtaaactgttttcgcggctgcgcagaaagaagaacatggttcgtgcagtgagtgctgcggaggggcgcagaggcccgcgccctggctggccctgtgcatgctgccttgcgccctgctcccaggtgccactaacccgtaatctggctctgtgtgcatgtgctgcccggcagggctgtcgtgtgcgtgttgggtgggaaggcggaggcggcgcggggcgggctggcctctgagcatctggctgcatttagcacg

SEQ ID NO: 293 - DNA, 504 bp, Artificial Sequence
  Synthetic
gagcctcctgcccctcaccaggccctgttagcatcacctcgggcacctggccacagcaggggccagtcagggcaccccgggatagcacgcccaggccctgtgcaaggcctctggcacttaggagaggcttttgcccctttgtcctctgagcagaagggttggcaaagagggaaggggacaggccagttctgcacctggcctttctccagaatgaaggcctccaccacccgtccttccccacagaaagaaaagtaaactgttttcgcggctgcgcagaaagaagaacatggttcgtgcagtgagtgctgcggaggggcgcagaggcccgcgccctggctggccctgtgcatgctgccttgcgccctgctcccaggtgccactaacccgtaatctgctgctctgtgtgcagtgctgcccggcagggctgtcgtgtgcgtgttgggtgggaaggcggaggcggcgcggggcgggctggcctctgagcatctggctgcatttagcacg

SEQ ID NO: 294 - DNA, 505 bp, Artificial Sequence
  Synthetic
gagcctcctgcccctcaccaggccctgttagcatcacctcgggcacctggccacagcaggggccagtcagggcaccccgggatagcacgcccaggccctgtgcaaggcctctggcacttaggagaggcttttgcccctttgtcctctgagcagaagggttggcaaagagggaaggggacaggccagttctgcacctggcctttctccagaatgaaggcctccaccacccgtccttccccacagaaagaaaagtaaactgttttcgcggctgcgcagaaagaagaacatggttcgtgcagtgagtgctgcggaggggcgcagaggcccgcgccctggctggccctgtgcatgctgccttgcgccctgctcccaggtgccactaacccgtaatctgctgctctgtgtgcatgtgctgcccggcagggctgtcgtgtgcgtgttgggtgggaaggcggaggcggcgcggggcgggctggcctctgagcatctggctgcatttagcacg

SEQ ID NO: 295 - DNA, 503 bp, Artificial Sequence
  Synthetic
gagcctcctgcccctcaccaggccctgttagcatcacctcgggcacctggccacagcaggggccagtcagggcaccccgggatagcacgcccaggccctgtgcaaggcctctggcacttaggagaggcttttgcccctttgtcctctgagcagaagggttggcaaagagggaaggggacaggccagttctgcacctggcctttctccagaatgaaggcctccaccacccgtccttccccacagaaagaaaagtaaactgttttcgcggctgcgcagaaagaagaacatggttcgtgcagtgagtgctgcggaggggcgcagaggcccgcgccctggctggccctgtgcatgctgccttgcgccctgctcccaggtgctcactaacccgtaatctggctctgtgtgcagtgctgcccggcagggctgtcgtgtgcgtgttgggtgggaaggcggaggcggcgcggggcgggctggcctctgagcatctggctgcatttagcacg

SEQ ID NO: 296 - DNA, 504 bp, Artificial Sequence
  Synthetic
gagcctcctgcccctcaccaggccctgttagcatcacctcgggcacctggccacagcaggggccagtcagggcaccccgggatagcacgcccaggccctgtgcaaggcctctggcacttaggagaggcttttgcccctttgtcctctgagcagaagggttggcaaagagggaaggggacaggccagttctgcacctggcctttctccagaatgaaggcctccaccacccgtccttccccacagaaagaaaagtaaactgttttcgcggctgcgcagaaagaagaacatggttcgtgcagtgagtgctgcggaggggcgcagaggcccgcgccctggctggccctgtgcatgctgccttgcgccctgctcccaggtgctcactaacccgtaatctggctctgtgtgcatgtgctgcccggcagggctgtcgtgtgcgtgttgggtgggaaggcggaggcggcgcggggcgggctggcctctgagcatctggctgcatttagcacg

SEQ ID NO: 297 - DNA, 505 bp, Artificial Sequence
  Synthetic
gagcctcctgcccctcaccaggccctgttagcatcacctcgggcacctggccacagcaggggccagtcagggcaccccgggatagcacgcccaggccctgtgcaaggcctctggcacttaggagaggcttttgcccctttgtcctctgagcagaagggttggcaaagagggaaggggacaggccagttctgcacctggcctttctccagaatgaaggcctccaccacccgtccttccccacagaaagaaaagtaaactgttttcgcggctgcgcagaaagaagaacatggttcgtgcagtgagtgctgcggaggggcgcagaggcccgcgccctggctggccctgtgcatgctgccttgcgccctgctcccaggtgctcactaacccgtaatctgctgctctgtgtgcagtgctgcccggcagggctgtcgtgtgcgtgttgggtgggaaggcggaggcggcgcggggcgggctggcctctgagcatctggctgcatttagcacg

SEQ ID NO: 298 - DNA, 506 bp, Artificial Sequence
  Synthetic
gagcctcctgcccctcaccaggccctgttagcatcacctcgggcacctggccacagcaggggccagtcagggcaccccgggatagcacgcccaggccctgtgcaaggcctctggcacttaggagaggcttttgcccctttgtcctctgagcagaagggttggcaaagagggaaggggacaggccagttctgcacctggcctttctccagaatgaaggcctccaccacccgtccttccccacagaaagaaaagtaaactgttttcgcggctgcgcagaaagaagaacatggttcgtgcagtgagtgctgcggaggggcgcagaggcccgcgccctggctggccctgtgcatgctgccttgcgccctgctcccaggtgctcactaacccgtaatctgctgctctgtgtgcatgtgctgcccggcagggctgtcgtgtgcgtgttgggtgggaaggcggaggcggcgcggggcgggctggcctctgagcatctggctgcatttagcacg

SEQ ID NO: 299 - DNA, 501 bp, Artificial Sequence
  Synthetic
gagcctcctgcccctcaccaggccctgttagcatcacctcgggcacctggccacagcaggggccagtcagggcaccccgggatagcacgcccaggccctgtgcaaggcctctggcacttaggagaggcttttgcccctttgtcctctgagcagaagggttggcaaagagggaaggggacaggccagttctgcacctggcctttctccagaatgaaggcctccacccaccgtccgtccccacagaaagaaaagtaaactgttttcgcggctgcgcagaaagaagaacatggtacgtgcagtgagtgctgcggaggggcgcagaggcccgcgccctggctggccctgtgcatgcgccttgcgccctgctcccaggtgccactaacccgtaatctggctctgtgtgcagtgctgcccggcagggctgtcgtgtgcgtgttgggtgggaaggcggaggcggcgcggggcgggctggcctctgagcatctggctgcatttagcacg

SEQ ID NO: 300 - DNA, 502 bp, Artificial Sequence
  Synthetic
gagcctcctgcccctcaccaggccctgttagcatcacctcgggcacctggccacagcaggggccagtcagggcaccccgggatagcacgcccaggccctgtgcaaggcctctggcacttaggagaggcttttgcccctttgtcctctgagcagaagggttggcaaagagggaaggggacaggccagttctgcacctggcctttctccagaatgaaggcctccacccaccgtccgtccccacagaaagaaaagtaaactgttttcgcggctgcgcagaaagaagaacatggtacgtgcagtgagtgctgcggaggggcgcagaggcccgcgccctggctggccctgtgcatgcgccttgcgccctgctcccaggtgccactaacccgtaatctggctctgtgtgcatgtgctgcccggcagggctgtcgtgtgcgtgttgggtgggaaggcggaggcggcgcggggcgggctggcctctgagcatctggctgcatttagcacg

SEQ ID NO: 301 - DNA, 503 bp, Artificial Sequence
  Synthetic
gagcctcctgcccctcaccaggccctgttagcatcacctcgggcacctggccacagcaggggccagtcagggcaccccgggatagcacgcccaggccctgtgcaaggcctctggcacttaggagaggcttttgcccctttgtcctctgagcagaagggttggcaaagagggaaggggacaggccagttctgcacctggcctttctccagaatgaaggcctccacccaccgtccgtccccacagaaagaaaagtaaactgttttcgcggctgcgcagaaagaagaacatggtacgtgcagtgagtgctgcggaggggcgcagaggcccgcgccctggctggccctgtgcatgcgccttgcgccctgctcccaggtgccactaacccgtaatctgctgctctgtgtgcagtgctgcccggcagggctgtcgtgtgcgtgttgggtgggaaggcggaggcggcgcggggcgggctggcctctgagcatctggctgcatttagcacg

SEQ ID NO: 302 - DNA, 504 bp, Artificial Sequence
  Synthetic
gagcctcctgcccctcaccaggccctgttagcatcacctcgggcacctggccacagcaggggccagtcagggcaccccgggatagcacgcccaggccctgtgcaaggcctctggcacttaggagaggcttttgcccctttgtcctctgagcagaagggttggcaaagagggaaggggacaggccagttctgcacctggcctttctccagaatgaaggcctccacccaccgtccgtccccacagaaagaaaagtaaactgttttcgcggctgcgcagaaagaagaacatggtacgtgcagtgagtgctgcggaggggcgcagaggcccgcgccctggctggccctgtgcatgcgccttgcgccctgctcccaggtgccactaacccgtaatctgctgctctgtgtgcatgtgctgcccggcagggctgtcgtgtgcgtgttgggtgggaaggcggaggcggcgcggggcgggctggcctctgagcatctggctgcatttagcacg

SEQ ID NO: 303 - DNA, 502 bp, Artificial Sequence
  Synthetic
gagcctcctgcccctcaccaggccctgttagcatcacctcgggcacctggccacagcaggggccagtcagggcaccccgggatagcacgcccaggccctgtgcaaggcctctggcacttaggagaggcttttgcccctttgtcctctgagcagaagggttggcaaagagggaaggggacaggccagttctgcacctggcctttctccagaatgaaggcctccacccaccgtccgtccccacagaaagaaaagtaaactgttttcgcggctgcgcagaaagaagaacatggtacgtgcagtgagtgctgcggaggggcgcagaggcccgcgccctggctggccctgtgcatgcgccttgcgccctgctcccaggtgctcactaacccgtaatctggctctgtgtgcagtgctgcccggcagggctgtcgtgtgcgtgttgggtgggaaggcggaggcggcgcggggcgggctggcctctgagcatctggctgcatttagcacg

SEQ ID NO: 304 - DNA, 503 bp, Artificial Sequence
  Synthetic
gagcctcctgcccctcaccaggccctgttagcatcacctcgggcacctggccacagcaggggccagtcagggcaccccgggatagcacgcccaggccctgtgcaaggcctctggcacttaggagaggcttttgcccctttgtcctctgagcagaagggttggcaaagagggaaggggacaggccagttctgcacctggcctttctccagaatgaaggcctccacccaccgtccgtccccacagaaagaaaagtaaactgttttcgcggctgcgcagaaagaagaacatggtacgtgcagtgagtgctgcggaggggcgcagaggcccgcgccctggctggccctgtgcatgcgccttgcgccctgctcccaggtgctcactaacccgtaatctggctctgtgtgcatgtgctgcccggcagggctgtcgtgtgcgtgttgggtgggaaggcggaggcggcgcggggcgggctggcctctgagcatctggctgcatttagcacg

SEQ ID NO: 305 - DNA, 504 bp, Artificial Sequence
  Synthetic
gagcctcctgcccctcaccaggccctgttagcatcacctcgggcacctggccacagcaggggccagtcagggcaccccgggatagcacgcccaggccctgtgcaaggcctctggcacttaggagaggcttttgcccctttgtcctctgagcagaagggttggcaaagagggaaggggacaggccagttctgcacctggcctttctccagaatgaaggcctccacccaccgtccgtccccacagaaagaaaagtaaactgttttcgcggctgcgcagaaagaagaacatggtacgtgcagtgagtgctgcggaggggcgcagaggcccgcgccctggctggccctgtgcatgcgccttgcgccctgctcccaggtgctcactaacccgtaatctgctgctctgtgtgcagtgctgcccggcagggctgtcgtgtgcgtgttgggtgggaaggcggaggcggcgcggggcgggctggcctctgagcatctggctgcatttagcacg

SEQ ID NO: 306 - DNA, 505 bp, Artificial Sequence
  Synthetic
gagcctcctgcccctcaccaggccctgttagcatcacctcgggcacctggccacagcaggggccagtcagggcaccccgggatagcacgcccaggccctgtgcaaggcctctggcacttaggagaggcttttgcccctttgtcctctgagcagaagggttggcaaagagggaaggggacaggccagttctgcacctggcctttctccagaatgaaggcctccacccaccgtccgtccccacagaaagaaaagtaaactgttttcgcggctgcgcagaaagaagaacatggtacgtgcagtgagtgctgcggaggggcgcagaggcccgcgccctggctggccctgtgcatgcgccttgcgccctgctcccaggtgctcactaacccgtaatctgctgctctgtgtgcatgtgctgcccggcagggctgtcgtgtgcgtgttgggtgggaaggcggaggcggcgcggggcgggctggcctctgagcatctggctgcatttagcacg

SEQ ID NO: 307 - DNA, 502 bp, Artificial Sequence
  Synthetic
gagcctcctgcccctcaccaggccctgttagcatcacctcgggcacctggccacagcaggggccagtcagggcaccccgggatagcacgcccaggccctgtgcaaggcctctggcacttaggagaggcttttgcccctttgtcctctgagcagaagggttggcaaagagggaaggggacaggccagttctgcacctggcctttctccagaatgaaggcctccacccaccgtccgtccccacagaaagaaaagtaaactgttttcgcggctgcgcagaaagaagaacatggtacgtgcagtgagtgctgcggaggggcgcagaggcccgcgccctggctggccctgtgcatgctgccttgcgccctgctcccaggtgccactaacccgtaatctggctctgtgtgcagtgctgcccggcagggctgtcgtgtgcgtgttgggtgggaaggcggaggcggcgcggggcgggctggcctctgagcatctggctgcatttagcacg

SEQ ID NO: 308 - DNA, 503 bp, Artificial Sequence
  Synthetic
gagcctcctgcccctcaccaggccctgttagcatcacctcgggcacctggccacagcaggggccagtcagggcaccccgggatagcacgcccaggccctgtgcaaggcctctggcacttaggagaggcttttgcccctttgtcctctgagcagaagggttggcaaagagggaaggggacaggccagttctgcacctggcctttctccagaatgaaggcctccacccaccgtccgtccccacagaaagaaaagtaaactgttttcgcggctgcgcagaaagaagaacatggtacgtgcagtgagtgctgcggaggggcgcagaggcccgcgccctggctggccctgtgcatgctgccttgcgccctgctcccaggtgccactaacccgtaatctggctctgtgtgcatgtgctgcccggcagggctgtcgtgtgcgtgttgggtgggaaggcggaggcggcgcggggcgggctggcctctgagcatctggctgcatttagcacg

SEQ ID NO: 309 - DNA, 504 bp, Artificial Sequence
  Synthetic
gagcctcctgcccctcaccaggccctgttagcatcacctcgggcacctggccacagcaggggccagtcagggcaccccgggatagcacgcccaggccctgtgcaaggcctctggcacttaggagaggcttttgcccctttgtcctctgagcagaagggttggcaaagagggaaggggacaggccagttctgcacctggcctttctccagaatgaaggcctccacccaccgtccgtccccacagaaagaaaagtaaactgttttcgcggctgcgcagaaagaagaacatggtacgtgcagtgagtgctgcggaggggcgcagaggcccgcgccctggctggccctgtgcatgctgccttgcgccctgctcccaggtgccactaacccgtaatctgctgctctgtgtgcagtgctgcccggcagggctgtcgtgtgcgtgttgggtgggaaggcggaggcggcgcggggcgggctggcctctgagcatctggctgcatttagcacg

SEQ ID NO: 310 - DNA, 505 bp, Artificial Sequence
  Synthetic
gagcctcctgcccctcaccaggccctgttagcatcacctcgggcacctggccacagcaggggccagtcagggcaccccgggatagcacgcccaggccctgtgcaaggcctctggcacttaggagaggcttttgcccctttgtcctctgagcagaagggttggcaaagagggaaggggacaggccagttctgcacctggcctttctccagaatgaaggcctccacccaccgtccgtccccacagaaagaaaagtaaactgttttcgcggctgcgcagaaagaagaacatggtacgtgcagtgagtgctgcggaggggcgcagaggcccgcgccctggctggccctgtgcatgctgccttgcgccctgctcccaggtgccactaacccgtaatctgctgctctgtgtgcatgtgctgcccggcagggctgtcgtgtgcgtgttgggtgggaaggcggaggcggcgcggggcgggctggcctctgagcatctggctgcatttagcacg

SEQ ID NO: 311 - DNA, 503 bp, Artificial Sequence
  Synthetic
gagcctcctgcccctcaccaggccctgttagcatcacctcgggcacctggccacagcaggggccagtcagggcaccccgggatagcacgcccaggccctgtgcaaggcctctggcacttaggagaggcttttgcccctttgtcctctgagcagaagggttggcaaagagggaaggggacaggccagttctgcacctggcctttctccagaatgaaggcctccacccaccgtccgtccccacagaaagaaaagtaaactgttttcgcggctgcgcagaaagaagaacatggtacgtgcagtgagtgctgcggaggggcgcagaggcccgcgccctggctggccctgtgcatgctgccttgcgccctgctcccaggtgctcactaacccgtaatctggctctgtgtgcagtgctgcccggcagggctgtcgtgtgcgtgttgggtgggaaggcggaggcggcgcggggcgggctggcctctgagcatctggctgcatttagcacg

SEQ ID NO: 312 - DNA, 504 bp, Artificial Sequence
  Synthetic
gagcctcctgcccctcaccaggccctgttagcatcacctcgggcacctggccacagcaggggccagtcagggcaccccgggatagcacgcccaggccctgtgcaaggcctctggcacttaggagaggcttttgcccctttgtcctctgagcagaagggttggcaaagagggaaggggacaggccagttctgcacctggcctttctccagaatgaaggcctccacccaccgtccgtccccacagaaagaaaagtaaactgttttcgcggctgcgcagaaagaagaacatggtacgtgcagtgagtgctgcggaggggcgcagaggcccgcgccctggctggccctgtgcatgctgccttgcgccctgctcccaggtgctcactaacccgtaatctggctctgtgtgcatgtgctgcccggcagggctgtcgtgtgcgtgttgggtgggaaggcggaggcggcgcggggcgggctggcctctgagcatctggctgcatttagcacg

SEQ ID NO: 313 - DNA, 505 bp, Artificial Sequence
  Synthetic
gagcctcctgcccctcaccaggccctgttagcatcacctcgggcacctggccacagcaggggccagtcagggcaccccgggatagcacgcccaggccctgtgcaaggcctctggcacttaggagaggcttttgcccctttgtcctctgagcagaagggttggcaaagagggaaggggacaggccagttctgcacctggcctttctccagaatgaaggcctccacccaccgtccgtccccacagaaagaaaagtaaactgttttcgcggctgcgcagaaagaagaacatggtacgtgcagtgagtgctgcggaggggcgcagaggcccgcgccctggctggccctgtgcatgctgccttgcgccctgctcccaggtgctcactaacccgtaatctgctgctctgtgtgcagtgctgcccggcagggctgtcgtgtgcgtgttgggtgggaaggcggaggcggcgcggggcgggctggcctctgagcatctggctgcatttagcacg

SEQ ID NO: 314 - DNA, 506 bp, Artificial Sequence
  Synthetic
gagcctcctgcccctcaccaggccctgttagcatcacctcgggcacctggccacagcaggggccagtcagggcaccccgggatagcacgcccaggccctgtgcaaggcctctggcacttaggagaggcttttgcccctttgtcctctgagcagaagggttggcaaagagggaaggggacaggccagttctgcacctggcctttctccagaatgaaggcctccacccaccgtccgtccccacagaaagaaaagtaaactgttttcgcggctgcgcagaaagaagaacatggtacgtgcagtgagtgctgcggaggggcgcagaggcccgcgccctggctggccctgtgcatgctgccttgcgccctgctcccaggtgctcactaacccgtaatctgctgctctgtgtgcatgtgctgcccggcagggctgtcgtgtgcgtgttgggtgggaaggcggaggcggcgcggggcgggctggcctctgagcatctggctgcatttagcacg

SEQ ID NO: 315 - DNA, 501 bp, Artificial Sequence
  Synthetic
gagcctcctgcccctcaccaggccctgttagcatcacctcgggcacctggccacagcaggggccagtcagggcaccccgggatagcacgcccaggccctgtgcaaggcctctggcacttaggagaggcttttgcccctttgtcctctgagcagaagggttggcaaagagggaaggggacaggccagttctgcacctggcctttctccagaatgaaggcctccacccaccgtccgtccccacagaaagaaaagtaaactgttttcgcggctgcgcagaaagaagaacatggtaagtgcagtgagtgctgcggaggggcgcagaggcccgcgccctggctggccctgtgcatgcgccttgcgccctgctcccaggtgccactaacccgtaatctggctctgtgtgcagtgctgcccggcagggctgtcgtgtgcgtgttgggtgggaaggcggaggcggcgcggggcgggctggcctctgagcatctggctgcatttagcacg

SEQ ID NO: 316 - DNA, 502 bp, Artificial Sequence
  Synthetic
gagcctcctgcccctcaccaggccctgttagcatcacctcgggcacctggccacagcaggggccagtcagggcaccccgggatagcacgcccaggccctgtgcaaggcctctggcacttaggagaggcttttgcccctttgtcctctgagcagaagggttggcaaagagggaaggggacaggccagttctgcacctggcctttctccagaatgaaggcctccacccaccgtccgtccccacagaaagaaaagtaaactgttttcgcggctgcgcagaaagaagaacatggtaagtgcagtgagtgctgcggaggggcgcagaggcccgcgccctggctggccctgtgcatgcgccttgcgccctgctcccaggtgccactaacccgtaatctggctctgtgtgcatgtgctgcccggcagggctgtcgtgtgcgtgttgggtgggaaggcggaggcggcgcggggcgggctggcctctgagcatctggctgcatttagcacg

SEQ ID NO: 317 - DNA, 503 bp, Artificial Sequence
  Synthetic
gagcctcctgcccctcaccaggccctgttagcatcacctcgggcacctggccacagcaggggccagtcagggcaccccgggatagcacgcccaggccctgtgcaaggcctctggcacttaggagaggcttttgcccctttgtcctctgagcagaagggttggcaaagagggaaggggacaggccagttctgcacctggcctttctccagaatgaaggcctccacccaccgtccgtccccacagaaagaaaagtaaactgttttcgcggctgcgcagaaagaagaacatggtaagtgcagtgagtgctgcggaggggcgcagaggcccgcgccctggctggccctgtgcatgcgccttgcgccctgctcccaggtgccactaacccgtaatctgctgctctgtgtgcagtgctgcccggcagggctgtcgtgtgcgtgttgggtgggaaggcggaggcggcgcggggcgggctggcctctgagcatctggctgcatttagcacg

SEQ ID NO: 318 - DNA, 504 bp, Artificial Sequence
  Synthetic
gagcctcctgcccctcaccaggccctgttagcatcacctcgggcacctggccacagcaggggccagtcagggcaccccgggatagcacgcccaggccctgtgcaaggcctctggcacttaggagaggcttttgcccctttgtcctctgagcagaagggttggcaaagagggaaggggacaggccagttctgcacctggcctttctccagaatgaaggcctccacccaccgtccgtccccacagaaagaaaagtaaactgttttcgcggctgcgcagaaagaagaacatggtaagtgcagtgagtgctgcggaggggcgcagaggcccgcgccctggctggccctgtgcatgcgccttgcgccctgctcccaggtgccactaacccgtaatctgctgctctgtgtgcatgtgctgcccggcagggctgtcgtgtgcgtgttgggtgggaaggcggaggcggcgcggggcgggctggcctctgagcatctggctgcatttagcacg

SEQ ID NO: 319 - DNA, 502 bp, Artificial Sequence
  Synthetic
gagcctcctgcccctcaccaggccctgttagcatcacctcgggcacctggccacagcaggggccagtcagggcaccccgggatagcacgcccaggccctgtgcaaggcctctggcacttaggagaggcttttgcccctttgtcctctgagcagaagggttggcaaagagggaaggggacaggccagttctgcacctggcctttctccagaatgaaggcctccacccaccgtccgtccccacagaaagaaaagtaaactgttttcgcggctgcgcagaaagaagaacatggtaagtgcagtgagtgctgcggaggggcgcagaggcccgcgccctggctggccctgtgcatgcgccttgcgccctgctcccaggtgctcactaacccgtaatctggctctgtgtgcagtgctgcccggcagggctgtcgtgtgcgtgttgggtgggaaggcggaggcggcgcggggcgggctggcctctgagcatctggctgcatttagcacg

SEQ ID NO: 320 - DNA, 503 bp, Artificial Sequence
  Synthetic
gagcctcctgcccctcaccaggccctgttagcatcacctcgggcacctggccacagcaggggccagtcagggcaccccgggatagcacgcccaggccctgtgcaaggcctctggcacttaggagaggcttttgcccctttgtcctctgagcagaagggttggcaaagagggaaggggacaggccagttctgcacctggcctttctccagaatgaaggcctccacccaccgtccgtccccacagaaagaaaagtaaactgttttcgcggctgcgcagaaagaagaacatggtaagtgcagtgagtgctgcggaggggcgcagaggcccgcgccctggctggccctgtgcatgcgccttgcgccctgctcccaggtgctcactaacccgtaatctggctctgtgtgcatgtgctgcccggcagggctgtcgtgtgcgtgttgggtgggaaggcggaggcggcgcggggcgggctggcctctgagcatctggctgcatttagcacg

SEQ ID NO: 321 - DNA, 504 bp, Artificial Sequence
  Synthetic
gagcctcctgcccctcaccaggccctgttagcatcacctcgggcacctggccacagcaggggccagtcagggcaccccgggatagcacgcccaggccctgtgcaaggcctctggcacttaggagaggcttttgcccctttgtcctctgagcagaagggttggcaaagagggaaggggacaggccagttctgcacctggcctttctccagaatgaaggcctccacccaccgtccgtccccacagaaagaaaagtaaactgttttcgcggctgcgcagaaagaagaacatggtaagtgcagtgagtgctgcggaggggcgcagaggcccgcgccctggctggccctgtgcatgcgccttgcgccctgctcccaggtgctcactaacccgtaatctgctgctctgtgtgcagtgctgcccggcagggctgtcgtgtgcgtgttgggtgggaaggcggaggcggcgcggggcgggctggcctctgagcatctggctgcatttagcacg

SEQ ID NO: 322 - DNA, 505 bp, Artificial Sequence
  Synthetic
gagcctcctgcccctcaccaggccctgttagcatcacctcgggcacctggccacagcaggggccagtcagggcaccccgggatagcacgcccaggccctgtgcaaggcctctggcacttaggagaggcttttgcccctttgtcctctgagcagaagggttggcaaagagggaaggggacaggccagttctgcacctggcctttctccagaatgaaggcctccacccaccgtccgtccccacagaaagaaaagtaaactgttttcgcggctgcgcagaaagaagaacatggtaagtgcagtgagtgctgcggaggggcgcagaggcccgcgccctggctggccctgtgcatgcgccttgcgccctgctcccaggtgctcactaacccgtaatctgctgctctgtgtgcatgtgctgcccggcagggctgtcgtgtgcgtgttgggtgggaaggcggaggcggcgcggggcgggctggcctctgagcatctggctgcatttagcacg

SEQ ID NO: 323 - DNA, 502 bp, Artificial Sequence
  Synthetic
gagcctcctgcccctcaccaggccctgttagcatcacctcgggcacctggccacagcaggggccagtcagggcaccccgggatagcacgcccaggccctgtgcaaggcctctggcacttaggagaggcttttgcccctttgtcctctgagcagaagggttggcaaagagggaaggggacaggccagttctgcacctggcctttctccagaatgaaggcctccacccaccgtccgtccccacagaaagaaaagtaaactgttttcgcggctgcgcagaaagaagaacatggtaagtgcagtgagtgctgcggaggggcgcagaggcccgcgccctggctggccctgtgcatgctgccttgcgccctgctcccaggtgccactaacccgtaatctggctctgtgtgcagtgctgcccggcagggctgtcgtgtgcgtgttgggtgggaaggcggaggcggcgcggggcgggctggcctctgagcatctggctgcatttagcacg

SEQ ID NO: 324 - DNA, 503 bp, Artificial Sequence
  Synthetic
gagcctcctgcccctcaccaggccctgttagcatcacctcgggcacctggccacagcaggggccagtcagggcaccccgggatagcacgcccaggccctgtgcaaggcctctggcacttaggagaggcttttgcccctttgtcctctgagcagaagggttggcaaagagggaaggggacaggccagttctgcacctggcctttctccagaatgaaggcctccacccaccgtccgtccccacagaaagaaaagtaaactgttttcgcggctgcgcagaaagaagaacatggtaagtgcagtgagtgctgcggaggggcgcagaggcccgcgccctggctggccctgtgcatgctgccttgcgccctgctcccaggtgccactaacccgtaatctggctctgtgtgcatgtgctgcccggcagggctgtcgtgtgcgtgttgggtgggaaggcggaggcggcgcggggcgggctggcctctgagcatctggctgcatttagcacg

SEQ ID NO: 325 - DNA, 504 bp, Artificial Sequence
  Synthetic
gagcctcctgcccctcaccaggccctgttagcatcacctcgggcacctggccacagcaggggccagtcagggcaccccgggatagcacgcccaggccctgtgcaaggcctctggcacttaggagaggcttttgcccctttgtcctctgagcagaagggttggcaaagagggaaggggacaggccagttctgcacctggcctttctccagaatgaaggcctccacccaccgtccgtccccacagaaagaaaagtaaactgttttcgcggctgcgcagaaagaagaacatggtaagtgcagtgagtgctgcggaggggcgcagaggcccgcgccctggctggccctgtgcatgctgccttgcgccctgctcccaggtgccactaacccgtaatctgctgctctgtgtgcagtgctgcccggcagggctgtcgtgtgcgtgttgggtgggaaggcggaggcggcgcggggcgggctggcctctgagcatctggctgcatttagcacg

SEQ ID NO: 326 - DNA, 505 bp, Artificial Sequence
  Synthetic
gagcctcctgcccctcaccaggccctgttagcatcacctcgggcacctggccacagcaggggccagtcagggcaccccgggatagcacgcccaggccctgtgcaaggcctctggcacttaggagaggcttttgcccctttgtcctctgagcagaagggttggcaaagagggaaggggacaggccagttctgcacctggcctttctccagaatgaaggcctccacccaccgtccgtccccacagaaagaaaagtaaactgttttcgcggctgcgcagaaagaagaacatggtaagtgcagtgagtgctgcggaggggcgcagaggcccgcgccctggctggccctgtgcatgctgccttgcgccctgctcccaggtgccactaacccgtaatctgctgctctgtgtgcatgtgctgcccggcagggctgtcgtgtgcgtgttgggtgggaaggcggaggcggcgcggggcgggctggcctctgagcatctggctgcatttagcacg

SEQ ID NO: 327 - DNA, 503 bp, Artificial Sequence
  Synthetic
gagcctcctgcccctcaccaggccctgttagcatcacctcgggcacctggccacagcaggggccagtcagggcaccccgggatagcacgcccaggccctgtgcaaggcctctggcacttaggagaggcttttgcccctttgtcctctgagcagaagggttggcaaagagggaaggggacaggccagttctgcacctggcctttctccagaatgaaggcctccacccaccgtccgtccccacagaaagaaaagtaaactgttttcgcggctgcgcagaaagaagaacatggtaagtgcagtgagtgctgcggaggggcgcagaggcccgcgccctggctggccctgtgcatgctgccttgcgccctgctcccaggtgctcactaacccgtaatctggctctgtgtgcagtgctgcccggcagggctgtcgtgtgcgtgttgggtgggaaggcggaggcggcgcggggcgggctggcctctgagcatctggctgcatttagcacg

SEQ ID NO: 328 - DNA, 504 bp, Artificial Sequence
  Synthetic
gagcctcctgcccctcaccaggccctgttagcatcacctcgggcacctggccacagcaggggccagtcagggcaccccgggatagcacgcccaggccctgtgcaaggcctctggcacttaggagaggcttttgcccctttgtcctctgagcagaagggttggcaaagagggaaggggacaggccagttctgcacctggcctttctccagaatgaaggcctccacccaccgtccgtccccacagaaagaaaagtaaactgttttcgcggctgcgcagaaagaagaacatggtaagtgcagtgagtgctgcggaggggcgcagaggcccgcgccctggctggccctgtgcatgctgccttgcgccctgctcccaggtgctcactaacccgtaatctggctctgtgtgcatgtgctgcccggcagggctgtcgtgtgcgtgttgggtgggaaggcggaggcggcgcggggcgggctggcctctgagcatctggctgcatttagcacg

SEQ ID NO: 329 - DNA, 505 bp, Artificial Sequence
  Synthetic
gagcctcctgcccctcaccaggccctgttagcatcacctcgggcacctggccacagcaggggccagtcagggcaccccgggatagcacgcccaggccctgtgcaaggcctctggcacttaggagaggcttttgcccctttgtcctctgagcagaagggttggcaaagagggaaggggacaggccagttctgcacctggcctttctccagaatgaaggcctccacccaccgtccgtccccacagaaagaaaagtaaactgttttcgcggctgcgcagaaagaagaacatggtaagtgcagtgagtgctgcggaggggcgcagaggcccgcgccctggctggccctgtgcatgctgccttgcgccctgctcccaggtgctcactaacccgtaatctgctgctctgtgtgcagtgctgcccggcagggctgtcgtgtgcgtgttgggtgggaaggcggaggcggcgcggggcgggctggcctctgagcatctggctgcatttagcacg

SEQ ID NO: 330 - DNA, 506 bp, Artificial Sequence
  Synthetic
gagcctcctgcccctcaccaggccctgttagcatcacctcgggcacctggccacagcaggggccagtcagggcaccccgggatagcacgcccaggccctgtgcaaggcctctggcacttaggagaggcttttgcccctttgtcctctgagcagaagggttggcaaagagggaaggggacaggccagttctgcacctggcctttctccagaatgaaggcctccacccaccgtccgtccccacagaaagaaaagtaaactgttttcgcggctgcgcagaaagaagaacatggtaagtgcagtgagtgctgcggaggggcgcagaggcccgcgccctggctggccctgtgcatgctgccttgcgccctgctcccaggtgctcactaacccgtaatctgctgctctgtgtgcatgtgctgcccggcagggctgtcgtgtgcgtgttgggtgggaaggcggaggcggcgcggggcgggctggcctctgagcatctggctgcatttagcacg

SEQ ID NO: 331 - DNA, 501 bp, Artificial Sequence
  Synthetic
gagcctcctgcccctcaccaggccctgttagcatcacctcgggcacctggccacagcaggggccagtcagggcaccccgggatagcacgcccaggccctgtgcaaggcctctggcacttaggagaggcttttgcccctttgtcctctgagcagaagggttggcaaagagggaaggggacaggccagttctgcacctggcctttctccagaatgaaggcctccacccaccgtccgtccccacagaaagaaaagtaaactgttttcgcggctgcgcagaaagaagaacatggtaggtgcagtgagtgctgcggaggggcgcagaggcccgcgccctggctggccctgtgcatgcgccttgcgccctgctcccaggtgccactaacccgtaatctggctctgtgtgcagtgctgcccggcagggctgtcgtgtgcgtgttgggtgggaaggcggaggcggcgcggggcgggctggcctctgagcatctggctgcatttagcacg

SEQ ID NO: 332 - DNA, 502 bp, Artificial Sequence
  Synthetic
gagcctcctgcccctcaccaggccctgttagcatcacctcgggcacctggccacagcaggggccagtcagggcaccccgggatagcacgcccaggccctgtgcaaggcctctggcacttaggagaggcttttgcccctttgtcctctgagcagaagggttggcaaagagggaaggggacaggccagttctgcacctggcctttctccagaatgaaggcctccacccaccgtccgtccccacagaaagaaaagtaaactgttttcgcggctgcgcagaaagaagaacatggtaggtgcagtgagtgctgcggaggggcgcagaggcccgcgccctggctggccctgtgcatgcgccttgcgccctgctcccaggtgccactaacccgtaatctggctctgtgtgcatgtgctgcccggcagggctgtcgtgtgcgtgttgggtgggaaggcggaggcggcgcggggcgggctggcctctgagcatctggctgcatttagcacg

SEQ ID NO: 333 - DNA, 503 bp, Artificial Sequence
  Synthetic
gagcctcctgcccctcaccaggccctgttagcatcacctcgggcacctggccacagcaggggccagtcagggcaccccgggatagcacgcccaggccctgtgcaaggcctctggcacttaggagaggcttttgcccctttgtcctctgagcagaagggttggcaaagagggaaggggacaggccagttctgcacctggcctttctccagaatgaaggcctccacccaccgtccgtccccacagaaagaaaagtaaactgttttcgcggctgcgcagaaagaagaacatggtaggtgcagtgagtgctgcggaggggcgcagaggcccgcgccctggctggccctgtgcatgcgccttgcgccctgctcccaggtgccactaacccgtaatctgctgctctgtgtgcagtgctgcccggcagggctgtcgtgtgcgtgttgggtgggaaggcggaggcggcgcggggcgggctggcctctgagcatctggctgcatttagcacg

SEQ ID NO: 334 - DNA, 504 bp, Artificial Sequence
  Synthetic
gagcctcctgcccctcaccaggccctgttagcatcacctcgggcacctggccacagcaggggccagtcagggcaccccgggatagcacgcccaggccctgtgcaaggcctctggcacttaggagaggcttttgcccctttgtcctctgagcagaagggttggcaaagagggaaggggacaggccagttctgcacctggcctttctccagaatgaaggcctccacccaccgtccgtccccacagaaagaaaagtaaactgttttcgcggctgcgcagaaagaagaacatggtaggtgcagtgagtgctgcggaggggcgcagaggcccgcgccctggctggccctgtgcatgcgccttgcgccctgctcccaggtgccactaacccgtaatctgctgctctgtgtgcatgtgctgcccggcagggctgtcgtgtgcgtgttgggtgggaaggcggaggcggcgcggggcgggctggcctctgagcatctggctgcatttagcacg

SEQ ID NO: 335 - DNA, 502 bp, Artificial Sequence
  Synthetic
gagcctcctgcccctcaccaggccctgttagcatcacctcgggcacctggccacagcaggggccagtcagggcaccccgggatagcacgcccaggccctgtgcaaggcctctggcacttaggagaggcttttgcccctttgtcctctgagcagaagggttggcaaagagggaaggggacaggccagttctgcacctggcctttctccagaatgaaggcctccacccaccgtccgtccccacagaaagaaaagtaaactgttttcgcggctgcgcagaaagaagaacatggtaggtgcagtgagtgctgcggaggggcgcagaggcccgcgccctggctggccctgtgcatgcgccttgcgccctgctcccaggtgctcactaacccgtaatctggctctgtgtgcagtgctgcccggcagggctgtcgtgtgcgtgttgggtgggaaggcggaggcggcgcggggcgggctggcctctgagcatctggctgcatttagcacg

SEQ ID NO: 336 - DNA, 503 bp, Artificial Sequence
  Synthetic
gagcctcctgcccctcaccaggccctgttagcatcacctcgggcacctggccacagcaggggccagtcagggcaccccgggatagcacgcccaggccctgtgcaaggcctctggcacttaggagaggcttttgcccctttgtcctctgagcagaagggttggcaaagagggaaggggacaggccagttctgcacctggcctttctccagaatgaaggcctccacccaccgtccgtccccacagaaagaaaagtaaactgttttcgcggctgcgcagaaagaagaacatggtaggtgcagtgagtgctgcggaggggcgcagaggcccgcgccctggctggccctgtgcatgcgccttgcgccctgctcccaggtgctcactaacccgtaatctggctctgtgtgcatgtgctgcccggcagggctgtcgtgtgcgtgttgggtgggaaggcggaggcggcgcggggcgggctggcctctgagcatctggctgcatttagcacg

SEQ ID NO: 337 - DNA, 504 bp, Artificial Sequence
  Synthetic
gagcctcctgcccctcaccaggccctgttagcatcacctcgggcacctggccacagcaggggccagtcagggcaccccgggatagcacgcccaggccctgtgcaaggcctctggcacttaggagaggcttttgcccctttgtcctctgagcagaagggttggcaaagagggaaggggacaggccagttctgcacctggcctttctccagaatgaaggcctccacccaccgtccgtccccacagaaagaaaagtaaactgttttcgcggctgcgcagaaagaagaacatggtaggtgcagtgagtgctgcggaggggcgcagaggcccgcgccctggctggccctgtgcatgcgccttgcgccctgctcccaggtgctcactaacccgtaatctgctgctctgtgtgcagtgctgcccggcagggctgtcgtgtgcgtgttgggtgggaaggcggaggcggcgcggggcgggctggcctctgagcatctggctgcatttagcacg

SEQ ID NO: 338 - DNA, 505 bp, Artificial Sequence
  Synthetic
gagcctcctgcccctcaccaggccctgttagcatcacctcgggcacctggccacagcaggggccagtcagggcaccccgggatagcacgcccaggccctgtgcaaggcctctggcacttaggagaggcttttgcccctttgtcctctgagcagaagggttggcaaagagggaaggggacaggccagttctgcacctggcctttctccagaatgaaggcctccacccaccgtccgtccccacagaaagaaaagtaaactgttttcgcggctgcgcagaaagaagaacatggtaggtgcagtgagtgctgcggaggggcgcagaggcccgcgccctggctggccctgtgcatgcgccttgcgccctgctcccaggtgctcactaacccgtaatctgctgctctgtgtgcatgtgctgcccggcagggctgtcgtgtgcgtgttgggtgggaaggcggaggcggcgcggggcgggctggcctctgagcatctggctgcatttagcacg

SEQ ID NO: 339 - DNA, 502 bp, Artificial Sequence
  Synthetic
gagcctcctgcccctcaccaggccctgttagcatcacctcgggcacctggccacagcaggggccagtcagggcaccccgggatagcacgcccaggccctgtgcaaggcctctggcacttaggagaggcttttgcccctttgtcctctgagcagaagggttggcaaagagggaaggggacaggccagttctgcacctggcctttctccagaatgaaggcctccacccaccgtccgtccccacagaaagaaaagtaaactgttttcgcggctgcgcagaaagaagaacatggtaggtgcagtgagtgctgcggaggggcgcagaggcccgcgccctggctggccctgtgcatgctgccttgcgccctgctcccaggtgccactaacccgtaatctggctctgtgtgcagtgctgcccggcagggctgtcgtgtgcgtgttgggtgggaaggcggaggcggcgcggggcgggctggcctctgagcatctggctgcatttagcacg

SEQ ID NO: 340 - DNA, 503 bp, Artificial Sequence
  Synthetic
gagcctcctgcccctcaccaggccctgttagcatcacctcgggcacctggccacagcaggggccagtcagggcaccccgggatagcacgcccaggccctgtgcaaggcctctggcacttaggagaggcttttgcccctttgtcctctgagcagaagggttggcaaagagggaaggggacaggccagttctgcacctggcctttctccagaatgaaggcctccacccaccgtccgtccccacagaaagaaaagtaaactgttttcgcggctgcgcagaaagaagaacatggtaggtgcagtgagtgctgcggaggggcgcagaggcccgcgccctggctggccctgtgcatgctgccttgcgccctgctcccaggtgccactaacccgtaatctggctctgtgtgcatgtgctgcccggcagggctgtcgtgtgcgtgttgggtgggaaggcggaggcggcgcggggcgggctggcctctgagcatctggctgcatttagcacg

SEQ ID NO: 341 - DNA, 504 bp, Artificial Sequence
  Synthetic
gagcctcctgcccctcaccaggccctgttagcatcacctcgggcacctggccacagcaggggccagtcagggcaccccgggatagcacgcccaggccctgtgcaaggcctctggcacttaggagaggcttttgcccctttgtcctctgagcagaagggttggcaaagagggaaggggacaggccagttctgcacctggcctttctccagaatgaaggcctccacccaccgtccgtccccacagaaagaaaagtaaactgttttcgcggctgcgcagaaagaagaacatggtaggtgcagtgagtgctgcggaggggcgcagaggcccgcgccctggctggccctgtgcatgctgccttgcgccctgctcccaggtgccactaacccgtaatctgctgctctgtgtgcagtgctgcccggcagggctgtcgtgtgcgtgttgggtgggaaggcggaggcggcgcggggcgggctggcctctgagcatctggctgcatttagcacg

SEQ ID NO: 342 - DNA, 505 bp, Artificial Sequence
  Synthetic
gagcctcctgcccctcaccaggccctgttagcatcacctcgggcacctggccacagcaggggccagtcagggcaccccgggatagcacgcccaggccctgtgcaaggcctctggcacttaggagaggcttttgcccctttgtcctctgagcagaagggttggcaaagagggaaggggacaggccagttctgcacctggcctttctccagaatgaaggcctccacccaccgtccgtccccacagaaagaaaagtaaactgttttcgcggctgcgcagaaagaagaacatggtaggtgcagtgagtgctgcggaggggcgcagaggcccgcgccctggctggccctgtgcatgctgccttgcgccctgctcccaggtgccactaacccgtaatctgctgctctgtgtgcatgtgctgcccggcagggctgtcgtgtgcgtgttgggtgggaaggcggaggcggcgcggggcgggctggcctctgagcatctggctgcatttagcacg

SEQ ID NO: 343 - DNA, 503 bp, Artificial Sequence
  Synthetic
gagcctcctgcccctcaccaggccctgttagcatcacctcgggcacctggccacagcaggggccagtcagggcaccccgggatagcacgcccaggccctgtgcaaggcctctggcacttaggagaggcttttgcccctttgtcctctgagcagaagggttggcaaagagggaaggggacaggccagttctgcacctggcctttctccagaatgaaggcctccacccaccgtccgtccccacagaaagaaaagtaaactgttttcgcggctgcgcagaaagaagaacatggtaggtgcagtgagtgctgcggaggggcgcagaggcccgcgccctggctggccctgtgcatgctgccttgcgccctgctcccaggtgctcactaacccgtaatctggctctgtgtgcagtgctgcccggcagggctgtcgtgtgcgtgttgggtgggaaggcggaggcggcgcggggcgggctggcctctgagcatctggctgcatttagcacg

SEQ ID NO: 344 - DNA, 504 bp, Artificial Sequence
  Synthetic
gagcctcctgcccctcaccaggccctgttagcatcacctcgggcacctggccacagcaggggccagtcagggcaccccgggatagcacgcccaggccctgtgcaaggcctctggcacttaggagaggcttttgcccctttgtcctctgagcagaagggttggcaaagagggaaggggacaggccagttctgcacctggcctttctccagaatgaaggcctccacccaccgtccgtccccacagaaagaaaagtaaactgttttcgcggctgcgcagaaagaagaacatggtaggtgcagtgagtgctgcggaggggcgcagaggcccgcgccctggctggccctgtgcatgctgccttgcgccctgctcccaggtgctcactaacccgtaatctggctctgtgtgcatgtgctgcccggcagggctgtcgtgtgcgtgttgggtgggaaggcggaggcggcgcggggcgggctggcctctgagcatctggctgcatttagcacg

SEQ ID NO: 345 - DNA, 505 bp, Artificial Sequence
  Synthetic
gagcctcctgcccctcaccaggccctgttagcatcacctcgggcacctggccacagcaggggccagtcagggcaccccgggatagcacgcccaggccctgtgcaaggcctctggcacttaggagaggcttttgcccctttgtcctctgagcagaagggttggcaaagagggaaggggacaggccagttctgcacctggcctttctccagaatgaaggcctccacccaccgtccgtccccacagaaagaaaagtaaactgttttcgcggctgcgcagaaagaagaacatggtaggtgcagtgagtgctgcggaggggcgcagaggcccgcgccctggctggccctgtgcatgctgccttgcgccctgctcccaggtgctcactaacccgtaatctgctgctctgtgtgcagtgctgcccggcagggctgtcgtgtgcgtgttgggtgggaaggcggaggcggcgcggggcgggctggcctctgagcatctggctgcatttagcacg

SEQ ID NO: 346 - DNA, 506 bp, Artificial Sequence
  Synthetic
gagcctcctgcccctcaccaggccctgttagcatcacctcgggcacctggccacagcaggggccagtcagggcaccccgggatagcacgcccaggccctgtgcaaggcctctggcacttaggagaggcttttgcccctttgtcctctgagcagaagggttggcaaagagggaaggggacaggccagttctgcacctggcctttctccagaatgaaggcctccacccaccgtccgtccccacagaaagaaaagtaaactgttttcgcggctgcgcagaaagaagaacatggtaggtgcagtgagtgctgcggaggggcgcagaggcccgcgccctggctggccctgtgcatgctgccttgcgccctgctcccaggtgctcactaacccgtaatctgctgctctgtgtgcatgtgctgcccggcagggctgtcgtgtgcgtgttgggtgggaaggcggaggcggcgcggggcgggctggcctctgagcatctggctgcatttagcacg

SEQ ID NO: 347 - DNA, 501 bp, Artificial Sequence
  Synthetic
gagcctcctgcccctcaccaggccctgttagcatcacctcgggcacctggccacagcaggggccagtcagggcaccccgggatagcacgcccaggccctgtgcaaggcctctggcacttaggagaggcttttgcccctttgtcctctgagcagaagggttggcaaagagggaaggggacaggccagttctgcacctggcctttctccagaatgaaggcctccacccaccgtccgtccccacagaaagaaaagtaaactgttttcgcggctgcgcagaaagaagaacatggtatgtgcagtgagtgctgcggaggggcgcagaggcccgcgccctggctggccctgtgcatgcgccttgcgccctgctcccaggtgccactaacccgtaatctggctctgtgtgcagtgctgcccggcagggctgtcgtgtgcgtgttgggtgggaaggcggaggcggcgcggggcgggctggcctctgagcatctggctgcatttagcacg

SEQ ID NO: 348 - DNA, 502 bp, Artificial Sequence
  Synthetic
gagcctcctgcccctcaccaggccctgttagcatcacctcgggcacctggccacagcaggggccagtcagggcaccccgggatagcacgcccaggccctgtgcaaggcctctggcacttaggagaggcttttgcccctttgtcctctgagcagaagggttggcaaagagggaaggggacaggccagttctgcacctggcctttctccagaatgaaggcctccacccaccgtccgtccccacagaaagaaaagtaaactgttttcgcggctgcgcagaaagaagaacatggtatgtgcagtgagtgctgcggaggggcgcagaggcccgcgccctggctggccctgtgcatgcgccttgcgccctgctcccaggtgccactaacccgtaatctggctctgtgtgcatgtgctgcccggcagggctgtcgtgtgcgtgttgggtgggaaggcggaggcggcgcggggcgggctggcctctgagcatctggctgcatttagcacg

SEQ ID NO: 349 - DNA, 503 bp, Artificial Sequence
  Synthetic
gagcctcctgcccctcaccaggccctgttagcatcacctcgggcacctggccacagcaggggccagtcagggcaccccgggatagcacgcccaggccctgtgcaaggcctctggcacttaggagaggcttttgcccctttgtcctctgagcagaagggttggcaaagagggaaggggacaggccagttctgcacctggcctttctccagaatgaaggcctccacccaccgtccgtccccacagaaagaaaagtaaactgttttcgcggctgcgcagaaagaagaacatggtatgtgcagtgagtgctgcggaggggcgcagaggcccgcgccctggctggccctgtgcatgcgccttgcgccctgctcccaggtgccactaacccgtaatctgctgctctgtgtgcagtgctgcccggcagggctgtcgtgtgcgtgttgggtgggaaggcggaggcggcgcggggcgggctggcctctgagcatctggctgcatttagcacg

SEQ ID NO: 350 - DNA, 504 bp, Artificial Sequence
  Synthetic
gagcctcctgcccctcaccaggccctgttagcatcacctcgggcacctggccacagcaggggccagtcagggcaccccgggatagcacgcccaggccctgtgcaaggcctctggcacttaggagaggcttttgcccctttgtcctctgagcagaagggttggcaaagagggaaggggacaggccagttctgcacctggcctttctccagaatgaaggcctccacccaccgtccgtccccacagaaagaaaagtaaactgttttcgcggctgcgcagaaagaagaacatggtatgtgcagtgagtgctgcggaggggcgcagaggcccgcgccctggctggccctgtgcatgcgccttgcgccctgctcccaggtgccactaacccgtaatctgctgctctgtgtgcatgtgctgcccggcagggctgtcgtgtgcgtgttgggtgggaaggcggaggcggcgcggggcgggctggcctctgagcatctggctgcatttagcacg

SEQ ID NO: 351 - DNA, 502 bp, Artificial Sequence
  Synthetic
gagcctcctgcccctcaccaggccctgttagcatcacctcgggcacctggccacagcaggggccagtcagggcaccccgggatagcacgcccaggccctgtgcaaggcctctggcacttaggagaggcttttgcccctttgtcctctgagcagaagggttggcaaagagggaaggggacaggccagttctgcacctggcctttctccagaatgaaggcctccacccaccgtccgtccccacagaaagaaaagtaaactgttttcgcggctgcgcagaaagaagaacatggtatgtgcagtgagtgctgcggaggggcgcagaggcccgcgccctggctggccctgtgcatgcgccttgcgccctgctcccaggtgctcactaacccgtaatctggctctgtgtgcagtgctgcccggcagggctgtcgtgtgcgtgttgggtgggaaggcggaggcggcgcggggcgggctggcctctgagcatctggctgcatttagcacg

SEQ ID NO: 352 - DNA, 503 bp, Artificial Sequence
  Synthetic
gagcctcctgcccctcaccaggccctgttagcatcacctcgggcacctggccacagcaggggccagtcagggcaccccgggatagcacgcccaggccctgtgcaaggcctctggcacttaggagaggcttttgcccctttgtcctctgagcagaagggttggcaaagagggaaggggacaggccagttctgcacctggcctttctccagaatgaaggcctccacccaccgtccgtccccacagaaagaaaagtaaactgttttcgcggctgcgcagaaagaagaacatggtatgtgcagtgagtgctgcggaggggcgcagaggcccgcgccctggctggccctgtgcatgcgccttgcgccctgctcccaggtgctcactaacccgtaatctggctctgtgtgcatgtgctgcccggcagggctgtcgtgtgcgtgttgggtgggaaggcggaggcggcgcggggcgggctggcctctgagcatctggctgcatttagcacg

SEQ ID NO: 353 - DNA, 504 bp, Artificial Sequence
  Synthetic
gagcctcctgcccctcaccaggccctgttagcatcacctcgggcacctggccacagcaggggccagtcagggcaccccgggatagcacgcccaggccctgtgcaaggcctctggcacttaggagaggcttttgcccctttgtcctctgagcagaagggttggcaaagagggaaggggacaggccagttctgcacctggcctttctccagaatgaaggcctccacccaccgtccgtccccacagaaagaaaagtaaactgttttcgcggctgcgcagaaagaagaacatggtatgtgcagtgagtgctgcggaggggcgcagaggcccgcgccctggctggccctgtgcatgcgccttgcgccctgctcccaggtgctcactaacccgtaatctgctgctctgtgtgcagtgctgcccggcagggctgtcgtgtgcgtgttgggtgggaaggcggaggcggcgcggggcgggctggcctctgagcatctggctgcatttagcacg

SEQ ID NO: 354 - DNA, 505 bp, Artificial Sequence
  Synthetic
gagcctcctgcccctcaccaggccctgttagcatcacctcgggcacctggccacagcaggggccagtcagggcaccccgggatagcacgcccaggccctgtgcaaggcctctggcacttaggagaggcttttgcccctttgtcctctgagcagaagggttggcaaagagggaaggggacaggccagttctgcacctggcctttctccagaatgaaggcctccacccaccgtccgtccccacagaaagaaaagtaaactgttttcgcggctgcgcagaaagaagaacatggtatgtgcagtgagtgctgcggaggggcgcagaggcccgcgccctggctggccctgtgcatgcgccttgcgccctgctcccaggtgctcactaacccgtaatctgctgctctgtgtgcatgtgctgcccggcagggctgtcgtgtgcgtgttgggtgggaaggcggaggcggcgcggggcgggctggcctctgagcatctggctgcatttagcacg

SEQ ID NO: 355 - DNA, 502 bp, Artificial Sequence
  Synthetic
gagcctcctgcccctcaccaggccctgttagcatcacctcgggcacctggccacagcaggggccagtcagggcaccccgggatagcacgcccaggccctgtgcaaggcctctggcacttaggagaggcttttgcccctttgtcctctgagcagaagggttggcaaagagggaaggggacaggccagttctgcacctggcctttctccagaatgaaggcctccacccaccgtccgtccccacagaaagaaaagtaaactgttttcgcggctgcgcagaaagaagaacatggtatgtgcagtgagtgctgcggaggggcgcagaggcccgcgccctggctggccctgtgcatgctgccttgcgccctgctcccaggtgccactaacccgtaatctggctctgtgtgcagtgctgcccggcagggctgtcgtgtgcgtgttgggtgggaaggcggaggcggcgcggggcgggctggcctctgagcatctggctgcatttagcacg

SEQ ID NO: 356 - DNA, 503 bp, Artificial Sequence
  Synthetic
gagcctcctgcccctcaccaggccctgttagcatcacctcgggcacctggccacagcaggggccagtcagggcaccccgggatagcacgcccaggccctgtgcaaggcctctggcacttaggagaggcttttgcccctttgtcctctgagcagaagggttggcaaagagggaaggggacaggccagttctgcacctggcctttctccagaatgaaggcctccacccaccgtccgtccccacagaaagaaaagtaaactgttttcgcggctgcgcagaaagaagaacatggtatgtgcagtgagtgctgcggaggggcgcagaggcccgcgccctggctggccctgtgcatgctgccttgcgccctgctcccaggtgccactaacccgtaatctggctctgtgtgcatgtgctgcccggcagggctgtcgtgtgcgtgttgggtgggaaggcggaggcggcgcggggcgggctggcctctgagcatctggctgcatttagcacg

SEQ ID NO: 357 - DNA, 504 bp, Artificial Sequence
  Synthetic
gagcctcctgcccctcaccaggccctgttagcatcacctcgggcacctggccacagcaggggccagtcagggcaccccgggatagcacgcccaggccctgtgcaaggcctctggcacttaggagaggcttttgcccctttgtcctctgagcagaagggttggcaaagagggaaggggacaggccagttctgcacctggcctttctccagaatgaaggcctccacccaccgtccgtccccacagaaagaaaagtaaactgttttcgcggctgcgcagaaagaagaacatggtatgtgcagtgagtgctgcggaggggcgcagaggcccgcgccctggctggccctgtgcatgctgccttgcgccctgctcccaggtgccactaacccgtaatctgctgctctgtgtgcagtgctgcccggcagggctgtcgtgtgcgtgttgggtgggaaggcggaggcggcgcggggcgggctggcctctgagcatctggctgcatttagcacg

SEQ ID NO: 358 - DNA, 505 bp, Artificial Sequence
  Synthetic
gagcctcctgcccctcaccaggccctgttagcatcacctcgggcacctggccacagcaggggccagtcagggcaccccgggatagcacgcccaggccctgtgcaaggcctctggcacttaggagaggcttttgcccctttgtcctctgagcagaagggttggcaaagagggaaggggacaggccagttctgcacctggcctttctccagaatgaaggcctccacccaccgtccgtccccacagaaagaaaagtaaactgttttcgcggctgcgcagaaagaagaacatggtatgtgcagtgagtgctgcggaggggcgcagaggcccgcgccctggctggccctgtgcatgctgccttgcgccctgctcccaggtgccactaacccgtaatctgctgctctgtgtgcatgtgctgcccggcagggctgtcgtgtgcgtgttgggtgggaaggcggaggcggcgcggggcgggctggcctctgagcatctggctgcatttagcacg

SEQ ID NO: 359 - DNA, 503 bp, Artificial Sequence
  Synthetic
gagcctcctgcccctcaccaggccctgttagcatcacctcgggcacctggccacagcaggggccagtcagggcaccccgggatagcacgcccaggccctgtgcaaggcctctggcacttaggagaggcttttgcccctttgtcctctgagcagaagggttggcaaagagggaaggggacaggccagttctgcacctggcctttctccagaatgaaggcctccacccaccgtccgtccccacagaaagaaaagtaaactgttttcgcggctgcgcagaaagaagaacatggtatgtgcagtgagtgctgcggaggggcgcagaggcccgcgccctggctggccctgtgcatgctgccttgcgccctgctcccaggtgctcactaacccgtaatctggctctgtgtgcagtgctgcccggcagggctgtcgtgtgcgtgttgggtgggaaggcggaggcggcgcggggcgggctggcctctgagcatctggctgcatttagcacg

SEQ ID NO: 360 - DNA, 504 bp, Artificial Sequence
  Synthetic
gagcctcctgcccctcaccaggccctgttagcatcacctcgggcacctggccacagcaggggccagtcagggcaccccgggatagcacgcccaggccctgtgcaaggcctctggcacttaggagaggcttttgcccctttgtcctctgagcagaagggttggcaaagagggaaggggacaggccagttctgcacctggcctttctccagaatgaaggcctccacccaccgtccgtccccacagaaagaaaagtaaactgttttcgcggctgcgcagaaagaagaacatggtatgtgcagtgagtgctgcggaggggcgcagaggcccgcgccctggctggccctgtgcatgctgccttgcgccctgctcccaggtgctcactaacccgtaatctggctctgtgtgcatgtgctgcccggcagggctgtcgtgtgcgtgttgggtgggaaggcggaggcggcgcggggcgggctggcctctgagcatctggctgcatttagcacg

SEQ ID NO: 361 - DNA, 505 bp, Artificial Sequence
  Synthetic
gagcctcctgcccctcaccaggccctgttagcatcacctcgggcacctggccacagcaggggccagtcagggcaccccgggatagcacgcccaggccctgtgcaaggcctctggcacttaggagaggcttttgcccctttgtcctctgagcagaagggttggcaaagagggaaggggacaggccagttctgcacctggcctttctccagaatgaaggcctccacccaccgtccgtccccacagaaagaaaagtaaactgttttcgcggctgcgcagaaagaagaacatggtatgtgcagtgagtgctgcggaggggcgcagaggcccgcgccctggctggccctgtgcatgctgccttgcgccctgctcccaggtgctcactaacccgtaatctgctgctctgtgtgcagtgctgcccggcagggctgtcgtgtgcgtgttgggtgggaaggcggaggcggcgcggggcgggctggcctctgagcatctggctgcatttagcacg

SEQ ID NO: 362 - DNA, 506 bp, Artificial Sequence
  Synthetic
gagcctcctgcccctcaccaggccctgttagcatcacctcgggcacctggccacagcaggggccagtcagggcaccccgggatagcacgcccaggccctgtgcaaggcctctggcacttaggagaggcttttgcccctttgtcctctgagcagaagggttggcaaagagggaaggggacaggccagttctgcacctggcctttctccagaatgaaggcctccacccaccgtccgtccccacagaaagaaaagtaaactgttttcgcggctgcgcagaaagaagaacatggtatgtgcagtgagtgctgcggaggggcgcagaggcccgcgccctggctggccctgtgcatgctgccttgcgccctgctcccaggtgctcactaacccgtaatctgctgctctgtgtgcatgtgctgcccggcagggctgtcgtgtgcgtgttgggtgggaaggcggaggcggcgcggggcgggctggcctctgagcatctggctgcatttagcacg

SEQ ID NO: 363 - DNA, 501 bp, Artificial Sequence
  Synthetic
gagcctcctgcccctcaccaggccctgttagcatcacctcgggcacctggccacagcaggggccagtcagggcaccccgggatagcacgcccaggccctgtgcaaggcctctggcacttaggagaggcttttgcccctttgtcctctgagcagaagggttggcaaagagggaaggggacaggccagttctgcacctggcctttctccagaatgaaggcctccacccaccgtccgtccccacagaaagaaaagtaaactgttttcgcggctgcgcagaaagaagaacatggtacgagcagtgagtgctgcggaggggcgcagaggcccgcgccctggctggccctgtgcatgcgccttgcgccctgctcccaggtgccactaacccgtaatctggctctgtgtgcagtgctgcccggcagggctgtcgtgtgcgtgttgggtgggaaggcggaggcggcgcggggcgggctggcctctgagcatctggctgcatttagcacg

SEQ ID NO: 364 - DNA, 502 bp, Artificial Sequence
  Synthetic
gagcctcctgcccctcaccaggccctgttagcatcacctcgggcacctggccacagcaggggccagtcagggcaccccgggatagcacgcccaggccctgtgcaaggcctctggcacttaggagaggcttttgcccctttgtcctctgagcagaagggttggcaaagagggaaggggacaggccagttctgcacctggcctttctccagaatgaaggcctccacccaccgtccgtccccacagaaagaaaagtaaactgttttcgcggctgcgcagaaagaagaacatggtacgagcagtgagtgctgcggaggggcgcagaggcccgcgccctggctggccctgtgcatgcgccttgcgccctgctcccaggtgccactaacccgtaatctggctctgtgtgcatgtgctgcccggcagggctgtcgtgtgcgtgttgggtgggaaggcggaggcggcgcggggcgggctggcctctgagcatctggctgcatttagcacg

SEQ ID NO: 365 - DNA, 503 bp, Artificial Sequence
  Synthetic
gagcctcctgcccctcaccaggccctgttagcatcacctcgggcacctggccacagcaggggccagtcagggcaccccgggatagcacgcccaggccctgtgcaaggcctctggcacttaggagaggcttttgcccctttgtcctctgagcagaagggttggcaaagagggaaggggacaggccagttctgcacctggcctttctccagaatgaaggcctccacccaccgtccgtccccacagaaagaaaagtaaactgttttcgcggctgcgcagaaagaagaacatggtacgagcagtgagtgctgcggaggggcgcagaggcccgcgccctggctggccctgtgcatgcgccttgcgccctgctcccaggtgccactaacccgtaatctgctgctctgtgtgcagtgctgcccggcagggctgtcgtgtgcgtgttgggtgggaaggcggaggcggcgcggggcgggctggcctctgagcatctggctgcatttagcacg

SEQ ID NO: 366 - DNA, 504 bp, Artificial Sequence
  Synthetic
gagcctcctgcccctcaccaggccctgttagcatcacctcgggcacctggccacagcaggggccagtcagggcaccccgggatagcacgcccaggccctgtgcaaggcctctggcacttaggagaggcttttgcccctttgtcctctgagcagaagggttggcaaagagggaaggggacaggccagttctgcacctggcctttctccagaatgaaggcctccacccaccgtccgtccccacagaaagaaaagtaaactgttttcgcggctgcgcagaaagaagaacatggtacgagcagtgagtgctgcggaggggcgcagaggcccgcgccctggctggccctgtgcatgcgccttgcgccctgctcccaggtgccactaacccgtaatctgctgctctgtgtgcatgtgctgcccggcagggctgtcgtgtgcgtgttgggtgggaaggcggaggcggcgcggggcgggctggcctctgagcatctggctgcatttagcacg

SEQ ID NO: 367 - DNA, 502 bp, Artificial Sequence
  Synthetic
gagcctcctgcccctcaccaggccctgttagcatcacctcgggcacctggccacagcaggggccagtcagggcaccccgggatagcacgcccaggccctgtgcaaggcctctggcacttaggagaggcttttgcccctttgtcctctgagcagaagggttggcaaagagggaaggggacaggccagttctgcacctggcctttctccagaatgaaggcctccacccaccgtccgtccccacagaaagaaaagtaaactgttttcgcggctgcgcagaaagaagaacatggtacgagcagtgagtgctgcggaggggcgcagaggcccgcgccctggctggccctgtgcatgcgccttgcgccctgctcccaggtgctcactaacccgtaatctggctctgtgtgcagtgctgcccggcagggctgtcgtgtgcgtgttgggtgggaaggcggaggcggcgcggggcgggctggcctctgagcatctggctgcatttagcacg

SEQ ID NO: 368 - DNA, 503 bp, Artificial Sequence
  Synthetic
gagcctcctgcccctcaccaggccctgttagcatcacctcgggcacctggccacagcaggggccagtcagggcaccccgggatagcacgcccaggccctgtgcaaggcctctggcacttaggagaggcttttgcccctttgtcctctgagcagaagggttggcaaagagggaaggggacaggccagttctgcacctggcctttctccagaatgaaggcctccacccaccgtccgtccccacagaaagaaaagtaaactgttttcgcggctgcgcagaaagaagaacatggtacgagcagtgagtgctgcggaggggcgcagaggcccgcgccctggctggccctgtgcatgcgccttgcgccctgctcccaggtgctcactaacccgtaatctggctctgtgtgcatgtgctgcccggcagggctgtcgtgtgcgtgttgggtgggaaggcggaggcggcgcggggcgggctggcctctgagcatctggctgcatttagcacg

SEQ ID NO: 369 - DNA, 504 bp, Artificial Sequence
  Synthetic
gagcctcctgcccctcaccaggccctgttagcatcacctcgggcacctggccacagcaggggccagtcagggcaccccgggatagcacgcccaggccctgtgcaaggcctctggcacttaggagaggcttttgcccctttgtcctctgagcagaagggttggcaaagagggaaggggacaggccagttctgcacctggcctttctccagaatgaaggcctccacccaccgtccgtccccacagaaagaaaagtaaactgttttcgcggctgcgcagaaagaagaacatggtacgagcagtgagtgctgcggaggggcgcagaggcccgcgccctggctggccctgtgcatgcgccttgcgccctgctcccaggtgctcactaacccgtaatctgctgctctgtgtgcagtgctgcccggcagggctgtcgtgtgcgtgttgggtgggaaggcggaggcggcgcggggcgggctggcctctgagcatctggctgcatttagcacg

SEQ ID NO: 370 - DNA, 505 bp, Artificial Sequence
  Synthetic
gagcctcctgcccctcaccaggccctgttagcatcacctcgggcacctggccacagcaggggccagtcagggcaccccgggatagcacgcccaggccctgtgcaaggcctctggcacttaggagaggcttttgcccctttgtcctctgagcagaagggttggcaaagagggaaggggacaggccagttctgcacctggcctttctccagaatgaaggcctccacccaccgtccgtccccacagaaagaaaagtaaactgttttcgcggctgcgcagaaagaagaacatggtacgagcagtgagtgctgcggaggggcgcagaggcccgcgccctggctggccctgtgcatgcgccttgcgccctgctcccaggtgctcactaacccgtaatctgctgctctgtgtgcatgtgctgcccggcagggctgtcgtgtgcgtgttgggtgggaaggcggaggcggcgcggggcgggctggcctctgagcatctggctgcatttagcacg

SEQ ID NO: 371 - DNA, 502 bp, Artificial Sequence
  Synthetic
gagcctcctgcccctcaccaggccctgttagcatcacctcgggcacctggccacagcaggggccagtcagggcaccccgggatagcacgcccaggccctgtgcaaggcctctggcacttaggagaggcttttgcccctttgtcctctgagcagaagggttggcaaagagggaaggggacaggccagttctgcacctggcctttctccagaatgaaggcctccacccaccgtccgtccccacagaaagaaaagtaaactgttttcgcggctgcgcagaaagaagaacatggtacgagcagtgagtgctgcggaggggcgcagaggcccgcgccctggctggccctgtgcatgctgccttgcgccctgctcccaggtgccactaacccgtaatctggctctgtgtgcagtgctgcccggcagggctgtcgtgtgcgtgttgggtgggaaggcggaggcggcgcggggcgggctggcctctgagcatctggctgcatttagcacg

SEQ ID NO: 372 - DNA, 503 bp, Artificial Sequence
  Synthetic
gagcctcctgcccctcaccaggccctgttagcatcacctcgggcacctggccacagcaggggccagtcagggcaccccgggatagcacgcccaggccctgtgcaaggcctctggcacttaggagaggcttttgcccctttgtcctctgagcagaagggttggcaaagagggaaggggacaggccagttctgcacctggcctttctccagaatgaaggcctccacccaccgtccgtccccacagaaagaaaagtaaactgttttcgcggctgcgcagaaagaagaacatggtacgagcagtgagtgctgcggaggggcgcagaggcccgcgccctggctggccctgtgcatgctgccttgcgccctgctcccaggtgccactaacccgtaatctggctctgtgtgcatgtgctgcccggcagggctgtcgtgtgcgtgttgggtgggaaggcggaggcggcgcggggcgggctggcctctgagcatctggctgcatttagcacg

SEQ ID NO: 373 - DNA, 504 bp, Artificial Sequence
  Synthetic
gagcctcctgcccctcaccaggccctgttagcatcacctcgggcacctggccacagcaggggccagtcagggcaccccgggatagcacgcccaggccctgtgcaaggcctctggcacttaggagaggcttttgcccctttgtcctctgagcagaagggttggcaaagagggaaggggacaggccagttctgcacctggcctttctccagaatgaaggcctccacccaccgtccgtccccacagaaagaaaagtaaactgttttcgcggctgcgcagaaagaagaacatggtacgagcagtgagtgctgcggaggggcgcagaggcccgcgccctggctggccctgtgcatgctgccttgcgccctgctcccaggtgccactaacccgtaatctgctgctctgtgtgcagtgctgcccggcagggctgtcgtgtgcgtgttgggtgggaaggcggaggcggcgcggggcgggctggcctctgagcatctggctgcatttagcacg

SEQ ID NO: 374 - DNA, 505 bp, Artificial Sequence
  Synthetic
gagcctcctgcccctcaccaggccctgttagcatcacctcgggcacctggccacagcaggggccagtcagggcaccccgggatagcacgcccaggccctgtgcaaggcctctggcacttaggagaggcttttgcccctttgtcctctgagcagaagggttggcaaagagggaaggggacaggccagttctgcacctggcctttctccagaatgaaggcctccacccaccgtccgtccccacagaaagaaaagtaaactgttttcgcggctgcgcagaaagaagaacatggtacgagcagtgagtgctgcggaggggcgcagaggcccgcgccctggctggccctgtgcatgctgccttgcgccctgctcccaggtgccactaacccgtaatctgctgctctgtgtgcatgtgctgcccggcagggctgtcgtgtgcgtgttgggtgggaaggcggaggcggcgcggggcgggctggcctctgagcatctggctgcatttagcacg

SEQ ID NO: 375 - DNA, 503 bp, Artificial Sequence
  Synthetic
gagcctcctgcccctcaccaggccctgttagcatcacctcgggcacctggccacagcaggggccagtcagggcaccccgggatagcacgcccaggccctgtgcaaggcctctggcacttaggagaggcttttgcccctttgtcctctgagcagaagggttggcaaagagggaaggggacaggccagttctgcacctggcctttctccagaatgaaggcctccacccaccgtccgtccccacagaaagaaaagtaaactgttttcgcggctgcgcagaaagaagaacatggtacgagcagtgagtgctgcggaggggcgcagaggcccgcgccctggctggccctgtgcatgctgccttgcgccctgctcccaggtgctcactaacccgtaatctggctctgtgtgcagtgctgcccggcagggctgtcgtgtgcgtgttgggtgggaaggcggaggcggcgcggggcgggctggcctctgagcatctggctgcatttagcacg

SEQ ID NO: 376 - DNA, 504 bp, Artificial Sequence
  Synthetic
gagcctcctgcccctcaccaggccctgttagcatcacctcgggcacctggccacagcaggggccagtcagggcaccccgggatagcacgcccaggccctgtgcaaggcctctggcacttaggagaggcttttgcccctttgtcctctgagcagaagggttggcaaagagggaaggggacaggccagttctgcacctggcctttctccagaatgaaggcctccacccaccgtccgtccccacagaaagaaaagtaaactgttttcgcggctgcgcagaaagaagaacatggtacgagcagtgagtgctgcggaggggcgcagaggcccgcgccctggctggccctgtgcatgctgccttgcgccctgctcccaggtgctcactaacccgtaatctggctctgtgtgcatgtgctgcccggcagggctgtcgtgtgcgtgttgggtgggaaggcggaggcggcgcggggcgggctggcctctgagcatctggctgcatttagcacg

SEQ ID NO: 377 - DNA, 505 bp, Artificial Sequence
  Synthetic
gagcctcctgcccctcaccaggccctgttagcatcacctcgggcacctggccacagcaggggccagtcagggcaccccgggatagcacgcccaggccctgtgcaaggcctctggcacttaggagaggcttttgcccctttgtcctctgagcagaagggttggcaaagagggaaggggacaggccagttctgcacctggcctttctccagaatgaaggcctccacccaccgtccgtccccacagaaagaaaagtaaactgttttcgcggctgcgcagaaagaagaacatggtacgagcagtgagtgctgcggaggggcgcagaggcccgcgccctggctggccctgtgcatgctgccttgcgccctgctcccaggtgctcactaacccgtaatctgctgctctgtgtgcagtgctgcccggcagggctgtcgtgtgcgtgttgggtgggaaggcggaggcggcgcggggcgggctggcctctgagcatctggctgcatttagcacg

SEQ ID NO: 378 - DNA, 506 bp, Artificial Sequence
  Synthetic
gagcctcctgcccctcaccaggccctgttagcatcacctcgggcacctggccacagcaggggccagtcagggcaccccgggatagcacgcccaggccctgtgcaaggcctctggcacttaggagaggcttttgcccctttgtcctctgagcagaagggttggcaaagagggaaggggacaggccagttctgcacctggcctttctccagaatgaaggcctccacccaccgtccgtccccacagaaagaaaagtaaactgttttcgcggctgcgcagaaagaagaacatggtacgagcagtgagtgctgcggaggggcgcagaggcccgcgccctggctggccctgtgcatgctgccttgcgccctgctcccaggtgctcactaacccgtaatctgctgctctgtgtgcatgtgctgcccggcagggctgtcgtgtgcgtgttgggtgggaaggcggaggcggcgcggggcgggctggcctctgagcatctggctgcatttagcacg

SEQ ID NO: 379 - DNA, 501 bp, Artificial Sequence
  Synthetic
gagcctcctgcccctcaccaggccctgttagcatcacctcgggcacctggccacagcaggggccagtcagggcaccccgggatagcacgcccaggccctgtgcaaggcctctggcacttaggagaggcttttgcccctttgtcctctgagcagaagggttggcaaagagggaaggggacaggccagttctgcacctggcctttctccagaatgaaggcctccacccaccgtccgtccccacagaaagaaaagtaaactgttttcgcggctgcgcagaaagaagaacatggttcgtgcagtgagtgctgcggaggggcgcagaggcccgcgccctggctggccctgtgcatgcgccttgcgccctgctcccaggtgccactaacccgtaatctggctctgtgtgcagtgctgcccggcagggctgtcgtgtgcgtgttgggtgggaaggcggaggcggcgcggggcgggctggcctctgagcatctggctgcatttagcacg

SEQ ID NO: 380 - DNA, 502 bp, Artificial Sequence
  Synthetic
gagcctcctgcccctcaccaggccctgttagcatcacctcgggcacctggccacagcaggggccagtcagggcaccccgggatagcacgcccaggccctgtgcaaggcctctggcacttaggagaggcttttgcccctttgtcctctgagcagaagggttggcaaagagggaaggggacaggccagttctgcacctggcctttctccagaatgaaggcctccacccaccgtccgtccccacagaaagaaaagtaaactgttttcgcggctgcgcagaaagaagaacatggttcgtgcagtgagtgctgcggaggggcgcagaggcccgcgccctggctggccctgtgcatgcgccttgcgccctgctcccaggtgccactaacccgtaatctggctctgtgtgcatgtgctgcccggcagggctgtcgtgtgcgtgttgggtgggaaggcggaggcggcgcggggcgggctggcctctgagcatctggctgcatttagcacg

SEQ ID NO: 381 - DNA, 503 bp, Artificial Sequence
  Synthetic
gagcctcctgcccctcaccaggccctgttagcatcacctcgggcacctggccacagcaggggccagtcagggcaccccgggatagcacgcccaggccctgtgcaaggcctctggcacttaggagaggcttttgcccctttgtcctctgagcagaagggttggcaaagagggaaggggacaggccagttctgcacctggcctttctccagaatgaaggcctccacccaccgtccgtccccacagaaagaaaagtaaactgttttcgcggctgcgcagaaagaagaacatggttcgtgcagtgagtgctgcggaggggcgcagaggcccgcgccctggctggccctgtgcatgcgccttgcgccctgctcccaggtgccactaacccgtaatctgctgctctgtgtgcagtgctgcccggcagggctgtcgtgtgcgtgttgggtgggaaggcggaggcggcgcggggcgggctggcctctgagcatctggctgcatttagcacg

SEQ ID NO: 382 - DNA, 504 bp, Artificial Sequence
  Synthetic
gagcctcctgcccctcaccaggccctgttagcatcacctcgggcacctggccacagcaggggccagtcagggcaccccgggatagcacgcccaggccctgtgcaaggcctctggcacttaggagaggcttttgcccctttgtcctctgagcagaagggttggcaaagagggaaggggacaggccagttctgcacctggcctttctccagaatgaaggcctccacccaccgtccgtccccacagaaagaaaagtaaactgttttcgcggctgcgcagaaagaagaacatggttcgtgcagtgagtgctgcggaggggcgcagaggcccgcgccctggctggccctgtgcatgcgccttgcgccctgctcccaggtgccactaacccgtaatctgctgctctgtgtgcatgtgctgcccggcagggctgtcgtgtgcgtgttgggtgggaaggcggaggcggcgcggggcgggctggcctctgagcatctggctgcatttagcacg

SEQ ID NO: 383 - DNA, 502 bp, Artificial Sequence
  Synthetic
gagcctcctgcccctcaccaggccctgttagcatcacctcgggcacctggccacagcaggggccagtcagggcaccccgggatagcacgcccaggccctgtgcaaggcctctggcacttaggagaggcttttgcccctttgtcctctgagcagaagggttggcaaagagggaaggggacaggccagttctgcacctggcctttctccagaatgaaggcctccacccaccgtccgtccccacagaaagaaaagtaaactgttttcgcggctgcgcagaaagaagaacatggttcgtgcagtgagtgctgcggaggggcgcagaggcccgcgccctggctggccctgtgcatgcgccttgcgccctgctcccaggtgctcactaacccgtaatctggctctgtgtgcagtgctgcccggcagggctgtcgtgtgcgtgttgggtgggaaggcggaggcggcgcggggcgggctggcctctgagcatctggctgcatttagcacg

SEQ ID NO: 384 - DNA, 503 bp, Artificial Sequence
  Synthetic
gagcctcctgcccctcaccaggccctgttagcatcacctcgggcacctggccacagcaggggccagtcagggcaccccgggatagcacgcccaggccctgtgcaaggcctctggcacttaggagaggcttttgcccctttgtcctctgagcagaagggttggcaaagagggaaggggacaggccagttctgcacctggcctttctccagaatgaaggcctccacccaccgtccgtccccacagaaagaaaagtaaactgttttcgcggctgcgcagaaagaagaacatggttcgtgcagtgagtgctgcggaggggcgcagaggcccgcgccctggctggccctgtgcatgcgccttgcgccctgctcccaggtgctcactaacccgtaatctggctctgtgtgcatgtgctgcccggcagggctgtcgtgtgcgtgttgggtgggaaggcggaggcggcgcggggcgggctggcctctgagcatctggctgcatttagcacg

SEQ ID NO: 385 - DNA, 504 bp, Artificial Sequence
  Synthetic
gagcctcctgcccctcaccaggccctgttagcatcacctcgggcacctggccacagcaggggccagtcagggcaccccgggatagcacgcccaggccctgtgcaaggcctctggcacttaggagaggcttttgcccctttgtcctctgagcagaagggttggcaaagagggaaggggacaggccagttctgcacctggcctttctccagaatgaaggcctccacccaccgtccgtccccacagaaagaaaagtaaactgttttcgcggctgcgcagaaagaagaacatggttcgtgcagtgagtgctgcggaggggcgcagaggcccgcgccctggctggccctgtgcatgcgccttgcgccctgctcccaggtgctcactaacccgtaatctgctgctctgtgtgcagtgctgcccggcagggctgtcgtgtgcgtgttgggtgggaaggcggaggcggcgcggggcgggctggcctctgagcatctggctgcatttagcacg

SEQ ID NO: 386 - DNA, 505 bp, Artificial Sequence
  Synthetic
gagcctcctgcccctcaccaggccctgttagcatcacctcgggcacctggccacagcaggggccagtcagggcaccccgggatagcacgcccaggccctgtgcaaggcctctggcacttaggagaggcttttgcccctttgtcctctgagcagaagggttggcaaagagggaaggggacaggccagttctgcacctggcctttctccagaatgaaggcctccacccaccgtccgtccccacagaaagaaaagtaaactgttttcgcggctgcgcagaaagaagaacatggttcgtgcagtgagtgctgcggaggggcgcagaggcccgcgccctggctggccctgtgcatgcgccttgcgccctgctcccaggtgctcactaacccgtaatctgctgctctgtgtgcatgtgctgcccggcagggctgtcgtgtgcgtgttgggtgggaaggcggaggcggcgcggggcgggctggcctctgagcatctggctgcatttagcacg

SEQ ID NO: 387 - DNA, 502 bp, Artificial Sequence
  Synthetic
gagcctcctgcccctcaccaggccctgttagcatcacctcgggcacctggccacagcaggggccagtcagggcaccccgggatagcacgcccaggccctgtgcaaggcctctggcacttaggagaggcttttgcccctttgtcctctgagcagaagggttggcaaagagggaaggggacaggccagttctgcacctggcctttctccagaatgaaggcctccacccaccgtccgtccccacagaaagaaaagtaaactgttttcgcggctgcgcagaaagaagaacatggttcgtgcagtgagtgctgcggaggggcgcagaggcccgcgccctggctggccctgtgcatgctgccttgcgccctgctcccaggtgccactaacccgtaatctggctctgtgtgcagtgctgcccggcagggctgtcgtgtgcgtgttgggtgggaaggcggaggcggcgcggggcgggctggcctctgagcatctggctgcatttagcacg

SEQ ID NO: 388 - DNA, 503 bp, Artificial Sequence
  Synthetic
gagcctcctgcccctcaccaggccctgttagcatcacctcgggcacctggccacagcaggggccagtcagggcaccccgggatagcacgcccaggccctgtgcaaggcctctggcacttaggagaggcttttgcccctttgtcctctgagcagaagggttggcaaagagggaaggggacaggccagttctgcacctggcctttctccagaatgaaggcctccacccaccgtccgtccccacagaaagaaaagtaaactgttttcgcggctgcgcagaaagaagaacatggttcgtgcagtgagtgctgcggaggggcgcagaggcccgcgccctggctggccctgtgcatgctgccttgcgccctgctcccaggtgccactaacccgtaatctggctctgtgtgcatgtgctgcccggcagggctgtcgtgtgcgtgttgggtgggaaggcggaggcggcgcggggcgggctggcctctgagcatctggctgcatttagcacg

SEQ ID NO: 389 - DNA, 504 bp, Artificial Sequence
  Synthetic
gagcctcctgcccctcaccaggccctgttagcatcacctcgggcacctggccacagcaggggccagtcagggcaccccgggatagcacgcccaggccctgtgcaaggcctctggcacttaggagaggcttttgcccctttgtcctctgagcagaagggttggcaaagagggaaggggacaggccagttctgcacctggcctttctccagaatgaaggcctccacccaccgtccgtccccacagaaagaaaagtaaactgttttcgcggctgcgcagaaagaagaacatggttcgtgcagtgagtgctgcggaggggcgcagaggcccgcgccctggctggccctgtgcatgctgccttgcgccctgctcccaggtgccactaacccgtaatctgctgctctgtgtgcagtgctgcccggcagggctgtcgtgtgcgtgttgggtgggaaggcggaggcggcgcggggcgggctggcctctgagcatctggctgcatttagcacg

SEQ ID NO: 390 - DNA, 505 bp, Artificial Sequence
  Synthetic
gagcctcctgcccctcaccaggccctgttagcatcacctcgggcacctggccacagcaggggccagtcagggcaccccgggatagcacgcccaggccctgtgcaaggcctctggcacttaggagaggcttttgcccctttgtcctctgagcagaagggttggcaaagagggaaggggacaggccagttctgcacctggcctttctccagaatgaaggcctccacccaccgtccgtccccacagaaagaaaagtaaactgttttcgcggctgcgcagaaagaagaacatggttcgtgcagtgagtgctgcggaggggcgcagaggcccgcgccctggctggccctgtgcatgctgccttgcgccctgctcccaggtgccactaacccgtaatctgctgctctgtgtgcatgtgctgcccggcagggctgtcgtgtgcgtgttgggtgggaaggcggaggcggcgcggggcgggctggcctctgagcatctggctgcatttagcacg

SEQ ID NO: 391 - DNA, 503 bp, Artificial Sequence
  Synthetic
gagcctcctgcccctcaccaggccctgttagcatcacctcgggcacctggccacagcaggggccagtcagggcaccccgggatagcacgcccaggccctgtgcaaggcctctggcacttaggagaggcttttgcccctttgtcctctgagcagaagggttggcaaagagggaaggggacaggccagttctgcacctggcctttctccagaatgaaggcctccacccaccgtccgtccccacagaaagaaaagtaaactgttttcgcggctgcgcagaaagaagaacatggttcgtgcagtgagtgctgcggaggggcgcagaggcccgcgccctggctggccctgtgcatgctgccttgcgccctgctcccaggtgctcactaacccgtaatctggctctgtgtgcagtgctgcccggcagggctgtcgtgtgcgtgttgggtgggaaggcggaggcggcgcggggcgggctggcctctgagcatctggctgcatttagcacg

SEQ ID NO: 392 - DNA, 504 bp, Artificial Sequence
  Synthetic
gagcctcctgcccctcaccaggccctgttagcatcacctcgggcacctggccacagcaggggccagtcagggcaccccgggatagcacgcccaggccctgtgcaaggcctctggcacttaggagaggcttttgcccctttgtcctctgagcagaagggttggcaaagagggaaggggacaggccagttctgcacctggcctttctccagaatgaaggcctccacccaccgtccgtccccacagaaagaaaagtaaactgttttcgcggctgcgcagaaagaagaacatggttcgtgcagtgagtgctgcggaggggcgcagaggcccgcgccctggctggccctgtgcatgctgccttgcgccctgctcccaggtgctcactaacccgtaatctggctctgtgtgcatgtgctgcccggcagggctgtcgtgtgcgtgttgggtgggaaggcggaggcggcgcggggcgggctggcctctgagcatctggctgcatttagcacg

SEQ ID NO: 393 - DNA, 505 bp, Artificial Sequence
  Synthetic
gagcctcctgcccctcaccaggccctgttagcatcacctcgggcacctggccacagcaggggccagtcagggcaccccgggatagcacgcccaggccctgtgcaaggcctctggcacttaggagaggcttttgcccctttgtcctctgagcagaagggttggcaaagagggaaggggacaggccagttctgcacctggcctttctccagaatgaaggcctccacccaccgtccgtccccacagaaagaaaagtaaactgttttcgcggctgcgcagaaagaagaacatggttcgtgcagtgagtgctgcggaggggcgcagaggcccgcgccctggctggccctgtgcatgctgccttgcgccctgctcccaggtgctcactaacccgtaatctgctgctctgtgtgcagtgctgcccggcagggctgtcgtgtgcgtgttgggtgggaaggcggaggcggcgcggggcgggctggcctctgagcatctggctgcatttagcacg

SEQ ID NO: 394 - DNA, 506 bp, Artificial Sequence
  Synthetic
gagcctcctgcccctcaccaggccctgttagcatcacctcgggcacctggccacagcaggggccagtcagggcaccccgggatagcacgcccaggccctgtgcaaggcctctggcacttaggagaggcttttgcccctttgtcctctgagcagaagggttggcaaagagggaaggggacaggccagttctgcacctggcctttctccagaatgaaggcctccacccaccgtccgtccccacagaaagaaaagtaaactgttttcgcggctgcgcagaaagaagaacatggttcgtgcagtgagtgctgcggaggggcgcagaggcccgcgccctggctggccctgtgcatgctgccttgcgccctgctcccaggtgctcactaacccgtaatctgctgctctgtgtgcatgtgctgcccggcagggctgtcgtgtgcgtgttgggtgggaaggcggaggcggcgcggggcgggctggcctctgagcatctggctgcatttagcacg

SEQ ID NO: 395 - DNA, 501 bp, Artificial Sequence
  Synthetic
gagcctcctgcccctcaccaggccctgttagcatcacctcgggcacctggccacagcaggggccagtcagggcaccccgggatagcacgcccaggccctgtgcaaggcctctggcacttaggagaggcttttgcccctttgtcctctgagcagaagggttggcaaagagggaaggggacaggccagttctgcacctggcctttctccagaatgaaggcctccaccacccgtccgttcccacagaaagaaaagtaaactgttttcgcggctgcgcagaaagaagaacatggtacgtgcagtgagtgctgcggaggggcgcagaggcccgcgccctggctggccctgtgcatgcgccttgcgccctgctcccaggtgccactaacccgtaatctggctctgtgtgcagtgctgcccggcagggctgtcgtgtgcgtgttgggtgggaaggcggaggcggcgcggggcgggctggcctctgagcatctggctgcatttagcacg

SEQ ID NO: 396 - DNA, 502 bp, Artificial Sequence
  Synthetic
gagcctcctgcccctcaccaggccctgttagcatcacctcgggcacctggccacagcaggggccagtcagggcaccccgggatagcacgcccaggccctgtgcaaggcctctggcacttaggagaggcttttgcccctttgtcctctgagcagaagggttggcaaagagggaaggggacaggccagttctgcacctggcctttctccagaatgaaggcctccaccacccgtccgttcccacagaaagaaaagtaaactgttttcgcggctgcgcagaaagaagaacatggtacgtgcagtgagtgctgcggaggggcgcagaggcccgcgccctggctggccctgtgcatgcgccttgcgccctgctcccaggtgccactaacccgtaatctggctctgtgtgcatgtgctgcccggcagggctgtcgtgtgcgtgttgggtgggaaggcggaggcggcgcggggcgggctggcctctgagcatctggctgcatttagcacg

SEQ ID NO: 397 - DNA, 503 bp, Artificial Sequence
  Synthetic
gagcctcctgcccctcaccaggccctgttagcatcacctcgggcacctggccacagcaggggccagtcagggcaccccgggatagcacgcccaggccctgtgcaaggcctctggcacttaggagaggcttttgcccctttgtcctctgagcagaagggttggcaaagagggaaggggacaggccagttctgcacctggcctttctccagaatgaaggcctccaccacccgtccgttcccacagaaagaaaagtaaactgttttcgcggctgcgcagaaagaagaacatggtacgtgcagtgagtgctgcggaggggcgcagaggcccgcgccctggctggccctgtgcatgcgccttgcgccctgctcccaggtgccactaacccgtaatctgctgctctgtgtgcagtgctgcccggcagggctgtcgtgtgcgtgttgggtgggaaggcggaggcggcgcggggcgggctggcctctgagcatctggctgcatttagcacg

SEQ ID NO: 398 - DNA, 504 bp, Artificial Sequence
  Synthetic
gagcctcctgcccctcaccaggccctgttagcatcacctcgggcacctggccacagcaggggccagtcagggcaccccgggatagcacgcccaggccctgtgcaaggcctctggcacttaggagaggcttttgcccctttgtcctctgagcagaagggttggcaaagagggaaggggacaggccagttctgcacctggcctttctccagaatgaaggcctccaccacccgtccgttcccacagaaagaaaagtaaactgttttcgcggctgcgcagaaagaagaacatggtacgtgcagtgagtgctgcggaggggcgcagaggcccgcgccctggctggccctgtgcatgcgccttgcgccctgctcccaggtgccactaacccgtaatctgctgctctgtgtgcatgtgctgcccggcagggctgtcgtgtgcgtgttgggtgggaaggcggaggcggcgcggggcgggctggcctctgagcatctggctgcatttagcacg

SEQ ID NO: 399 - DNA, 502 bp, Artificial Sequence
  Synthetic
gagcctcctgcccctcaccaggccctgttagcatcacctcgggcacctggccacagcaggggccagtcagggcaccccgggatagcacgcccaggccctgtgcaaggcctctggcacttaggagaggcttttgcccctttgtcctctgagcagaagggttggcaaagagggaaggggacaggccagttctgcacctggcctttctccagaatgaaggcctccaccacccgtccgttcccacagaaagaaaagtaaactgttttcgcggctgcgcagaaagaagaacatggtacgtgcagtgagtgctgcggaggggcgcagaggcccgcgccctggctggccctgtgcatgcgccttgcgccctgctcccaggtgctcactaacccgtaatctggctctgtgtgcagtgctgcccggcagggctgtcgtgtgcgtgttgggtgggaaggcggaggcggcgcggggcgggctggcctctgagcatctggctgcatttagcacg

SEQ ID NO: 400 - DNA, 503 bp, Artificial Sequence
  Synthetic
gagcctcctgcccctcaccaggccctgttagcatcacctcgggcacctggccacagcaggggccagtcagggcaccccgggatagcacgcccaggccctgtgcaaggcctctggcacttaggagaggcttttgcccctttgtcctctgagcagaagggttggcaaagagggaaggggacaggccagttctgcacctggcctttctccagaatgaaggcctccaccacccgtccgttcccacagaaagaaaagtaaactgttttcgcggctgcgcagaaagaagaacatggtacgtgcagtgagtgctgcggaggggcgcagaggcccgcgccctggctggccctgtgcatgcgccttgcgccctgctcccaggtgctcactaacccgtaatctggctctgtgtgcatgtgctgcccggcagggctgtcgtgtgcgtgttgggtgggaaggcggaggcggcgcggggcgggctggcctctgagcatctggctgcatttagcacg

SEQ ID NO: 401 - DNA, 504 bp, Artificial Sequence
  Synthetic
gagcctcctgcccctcaccaggccctgttagcatcacctcgggcacctggccacagcaggggccagtcagggcaccccgggatagcacgcccaggccctgtgcaaggcctctggcacttaggagaggcttttgcccctttgtcctctgagcagaagggttggcaaagagggaaggggacaggccagttctgcacctggcctttctccagaatgaaggcctccaccacccgtccgttcccacagaaagaaaagtaaactgttttcgcggctgcgcagaaagaagaacatggtacgtgcagtgagtgctgcggaggggcgcagaggcccgcgccctggctggccctgtgcatgcgccttgcgccctgctcccaggtgctcactaacccgtaatctgctgctctgtgtgcagtgctgcccggcagggctgtcgtgtgcgtgttgggtgggaaggcggaggcggcgcggggcgggctggcctctgagcatctggctgcatttagcacg

SEQ ID NO: 402 - DNA, 505 bp, Artificial Sequence
  Synthetic
gagcctcctgcccctcaccaggccctgttagcatcacctcgggcacctggccacagcaggggccagtcagggcaccccgggatagcacgcccaggccctgtgcaaggcctctggcacttaggagaggcttttgcccctttgtcctctgagcagaagggttggcaaagagggaaggggacaggccagttctgcacctggcctttctccagaatgaaggcctccaccacccgtccgttcccacagaaagaaaagtaaactgttttcgcggctgcgcagaaagaagaacatggtacgtgcagtgagtgctgcggaggggcgcagaggcccgcgccctggctggccctgtgcatgcgccttgcgccctgctcccaggtgctcactaacccgtaatctgctgctctgtgtgcatgtgctgcccggcagggctgtcgtgtgcgtgttgggtgggaaggcggaggcggcgcggggcgggctggcctctgagcatctggctgcatttagcacg

SEQ ID NO: 403 - DNA, 502 bp, Artificial Sequence
  Synthetic
gagcctcctgcccctcaccaggccctgttagcatcacctcgggcacctggccacagcaggggccagtcagggcaccccgggatagcacgcccaggccctgtgcaaggcctctggcacttaggagaggcttttgcccctttgtcctctgagcagaagggttggcaaagagggaaggggacaggccagttctgcacctggcctttctccagaatgaaggcctccaccacccgtccgttcccacagaaagaaaagtaaactgttttcgcggctgcgcagaaagaagaacatggtacgtgcagtgagtgctgcggaggggcgcagaggcccgcgccctggctggccctgtgcatgctgccttgcgccctgctcccaggtgccactaacccgtaatctggctctgtgtgcagtgctgcccggcagggctgtcgtgtgcgtgttgggtgggaaggcggaggcggcgcggggcgggctggcctctgagcatctggctgcatttagcacg

SEQ ID NO: 404 - DNA, 503 bp, Artificial Sequence
  Synthetic
gagcctcctgcccctcaccaggccctgttagcatcacctcgggcacctggccacagcaggggccagtcagggcaccccgggatagcacgcccaggccctgtgcaaggcctctggcacttaggagaggcttttgcccctttgtcctctgagcagaagggttggcaaagagggaaggggacaggccagttctgcacctggcctttctccagaatgaaggcctccaccacccgtccgttcccacagaaagaaaagtaaactgttttcgcggctgcgcagaaagaagaacatggtacgtgcagtgagtgctgcggaggggcgcagaggcccgcgccctggctggccctgtgcatgctgccttgcgccctgctcccaggtgccactaacccgtaatctggctctgtgtgcatgtgctgcccggcagggctgtcgtgtgcgtgttgggtgggaaggcggaggcggcgcggggcgggctggcctctgagcatctggctgcatttagcacg

SEQ ID NO: 405 - DNA, 504 bp, Artificial Sequence
  Synthetic
gagcctcctgcccctcaccaggccctgttagcatcacctcgggcacctggccacagcaggggccagtcagggcaccccgggatagcacgcccaggccctgtgcaaggcctctggcacttaggagaggcttttgcccctttgtcctctgagcagaagggttggcaaagagggaaggggacaggccagttctgcacctggcctttctccagaatgaaggcctccaccacccgtccgttcccacagaaagaaaagtaaactgttttcgcggctgcgcagaaagaagaacatggtacgtgcagtgagtgctgcggaggggcgcagaggcccgcgccctggctggccctgtgcatgctgccttgcgccctgctcccaggtgccactaacccgtaatctgctgctctgtgtgcagtgctgcccggcagggctgtcgtgtgcgtgttgggtgggaaggcggaggcggcgcggggcgggctggcctctgagcatctggctgcatttagcacg

SEQ ID NO: 406 - DNA, 505 bp, Artificial Sequence
  Synthetic
gagcctcctgcccctcaccaggccctgttagcatcacctcgggcacctggccacagcaggggccagtcagggcaccccgggatagcacgcccaggccctgtgcaaggcctctggcacttaggagaggcttttgcccctttgtcctctgagcagaagggttggcaaagagggaaggggacaggccagttctgcacctggcctttctccagaatgaaggcctccaccacccgtccgttcccacagaaagaaaagtaaactgttttcgcggctgcgcagaaagaagaacatggtacgtgcagtgagtgctgcggaggggcgcagaggcccgcgccctggctggccctgtgcatgctgccttgcgccctgctcccaggtgccactaacccgtaatctgctgctctgtgtgcatgtgctgcccggcagggctgtcgtgtgcgtgttgggtgggaaggcggaggcggcgcggggcgggctggcctctgagcatctggctgcatttagcacg

SEQ ID NO: 407 - DNA, 503 bp, Artificial Sequence
  Synthetic
gagcctcctgcccctcaccaggccctgttagcatcacctcgggcacctggccacagcaggggccagtcagggcaccccgggatagcacgcccaggccctgtgcaaggcctctggcacttaggagaggcttttgcccctttgtcctctgagcagaagggttggcaaagagggaaggggacaggccagttctgcacctggcctttctccagaatgaaggcctccaccacccgtccgttcccacagaaagaaaagtaaactgttttcgcggctgcgcagaaagaagaacatggtacgtgcagtgagtgctgcggaggggcgcagaggcccgcgccctggctggccctgtgcatgctgccttgcgccctgctcccaggtgctcactaacccgtaatctggctctgtgtgcagtgctgcccggcagggctgtcgtgtgcgtgttgggtgggaaggcggaggcggcgcggggcgggctggcctctgagcatctggctgcatttagcacg

SEQ ID NO: 408 - DNA, 504 bp, Artificial Sequence
  Synthetic
gagcctcctgcccctcaccaggccctgttagcatcacctcgggcacctggccacagcaggggccagtcagggcaccccgggatagcacgcccaggccctgtgcaaggcctctggcacttaggagaggcttttgcccctttgtcctctgagcagaagggttggcaaagagggaaggggacaggccagttctgcacctggcctttctccagaatgaaggcctccaccacccgtccgttcccacagaaagaaaagtaaactgttttcgcggctgcgcagaaagaagaacatggtacgtgcagtgagtgctgcggaggggcgcagaggcccgcgccctggctggccctgtgcatgctgccttgcgccctgctcccaggtgctcactaacccgtaatctggctctgtgtgcatgtgctgcccggcagggctgtcgtgtgcgtgttgggtgggaaggcggaggcggcgcggggcgggctggcctctgagcatctggctgcatttagcacg

SEQ ID NO: 409 - DNA, 505 bp, Artificial Sequence
  Synthetic
gagcctcctgcccctcaccaggccctgttagcatcacctcgggcacctggccacagcaggggccagtcagggcaccccgggatagcacgcccaggccctgtgcaaggcctctggcacttaggagaggcttttgcccctttgtcctctgagcagaagggttggcaaagagggaaggggacaggccagttctgcacctggcctttctccagaatgaaggcctccaccacccgtccgttcccacagaaagaaaagtaaactgttttcgcggctgcgcagaaagaagaacatggtacgtgcagtgagtgctgcggaggggcgcagaggcccgcgccctggctggccctgtgcatgctgccttgcgccctgctcccaggtgctcactaacccgtaatctgctgctctgtgtgcagtgctgcccggcagggctgtcgtgtgcgtgttgggtgggaaggcggaggcggcgcggggcgggctggcctctgagcatctggctgcatttagcacg

SEQ ID NO: 410 - DNA, 506 bp, Artificial Sequence
  Synthetic
gagcctcctgcccctcaccaggccctgttagcatcacctcgggcacctggccacagcaggggccagtcagggcaccccgggatagcacgcccaggccctgtgcaaggcctctggcacttaggagaggcttttgcccctttgtcctctgagcagaagggttggcaaagagggaaggggacaggccagttctgcacctggcctttctccagaatgaaggcctccaccacccgtccgttcccacagaaagaaaagtaaactgttttcgcggctgcgcagaaagaagaacatggtacgtgcagtgagtgctgcggaggggcgcagaggcccgcgccctggctggccctgtgcatgctgccttgcgccctgctcccaggtgctcactaacccgtaatctgctgctctgtgtgcatgtgctgcccggcagggctgtcgtgtgcgtgttgggtgggaaggcggaggcggcgcggggcgggctggcctctgagcatctggctgcatttagcacg

SEQ ID NO: 411 - DNA, 501 bp, Artificial Sequence
  Synthetic
gagcctcctgcccctcaccaggccctgttagcatcacctcgggcacctggccacagcaggggccagtcagggcaccccgggatagcacgcccaggccctgtgcaaggcctctggcacttaggagaggcttttgcccctttgtcctctgagcagaagggttggcaaagagggaaggggacaggccagttctgcacctggcctttctccagaatgaaggcctccaccacccgtccgttcccacagaaagaaaagtaaactgttttcgcggctgcgcagaaagaagaacatggtaagtgcagtgagtgctgcggaggggcgcagaggcccgcgccctggctggccctgtgcatgcgccttgcgccctgctcccaggtgccactaacccgtaatctggctctgtgtgcagtgctgcccggcagggctgtcgtgtgcgtgttgggtgggaaggcggaggcggcgcggggcgggctggcctctgagcatctggctgcatttagcacg

SEQ ID NO: 412 - DNA, 502 bp, Artificial Sequence
  Synthetic
gagcctcctgcccctcaccaggccctgttagcatcacctcgggcacctggccacagcaggggccagtcagggcaccccgggatagcacgcccaggccctgtgcaaggcctctggcacttaggagaggcttttgcccctttgtcctctgagcagaagggttggcaaagagggaaggggacaggccagttctgcacctggcctttctccagaatgaaggcctccaccacccgtccgttcccacagaaagaaaagtaaactgttttcgcggctgcgcagaaagaagaacatggtaagtgcagtgagtgctgcggaggggcgcagaggcccgcgccctggctggccctgtgcatgcgccttgcgccctgctcccaggtgccactaacccgtaatctggctctgtgtgcatgtgctgcccggcagggctgtcgtgtgcgtgttgggtgggaaggcggaggcggcgcggggcgggctggcctctgagcatctggctgcatttagcacg

SEQ ID NO: 413 - DNA, 503 bp, Artificial Sequence
  Synthetic
gagcctcctgcccctcaccaggccctgttagcatcacctcgggcacctggccacagcaggggccagtcagggcaccccgggatagcacgcccaggccctgtgcaaggcctctggcacttaggagaggcttttgcccctttgtcctctgagcagaagggttggcaaagagggaaggggacaggccagttctgcacctggcctttctccagaatgaaggcctccaccacccgtccgttcccacagaaagaaaagtaaactgttttcgcggctgcgcagaaagaagaacatggtaagtgcagtgagtgctgcggaggggcgcagaggcccgcgccctggctggccctgtgcatgcgccttgcgccctgctcccaggtgccactaacccgtaatctgctgctctgtgtgcagtgctgcccggcagggctgtcgtgtgcgtgttgggtgggaaggcggaggcggcgcggggcgggctggcctctgagcatctggctgcatttagcacg

SEQ ID NO: 414 - DNA, 504 bp, Artificial Sequence
  Synthetic
gagcctcctgcccctcaccaggccctgttagcatcacctcgggcacctggccacagcaggggccagtcagggcaccccgggatagcacgcccaggccctgtgcaaggcctctggcacttaggagaggcttttgcccctttgtcctctgagcagaagggttggcaaagagggaaggggacaggccagttctgcacctggcctttctccagaatgaaggcctccaccacccgtccgttcccacagaaagaaaagtaaactgttttcgcggctgcgcagaaagaagaacatggtaagtgcagtgagtgctgcggaggggcgcagaggcccgcgccctggctggccctgtgcatgcgccttgcgccctgctcccaggtgccactaacccgtaatctgctgctctgtgtgcatgtgctgcccggcagggctgtcgtgtgcgtgttgggtgggaaggcggaggcggcgcggggcgggctggcctctgagcatctggctgcatttagcacg

SEQ ID NO: 415 - DNA, 502 bp, Artificial Sequence
  Synthetic
gagcctcctgcccctcaccaggccctgttagcatcacctcgggcacctggccacagcaggggccagtcagggcaccccgggatagcacgcccaggccctgtgcaaggcctctggcacttaggagaggcttttgcccctttgtcctctgagcagaagggttggcaaagagggaaggggacaggccagttctgcacctggcctttctccagaatgaaggcctccaccacccgtccgttcccacagaaagaaaagtaaactgttttcgcggctgcgcagaaagaagaacatggtaagtgcagtgagtgctgcggaggggcgcagaggcccgcgccctggctggccctgtgcatgcgccttgcgccctgctcccaggtgctcactaacccgtaatctggctctgtgtgcagtgctgcccggcagggctgtcgtgtgcgtgttgggtgggaaggcggaggcggcgcggggcgggctggcctctgagcatctggctgcatttagcacg

SEQ ID NO: 416 - DNA, 503 bp, Artificial Sequence
  Synthetic
gagcctcctgcccctcaccaggccctgttagcatcacctcgggcacctggccacagcaggggccagtcagggcaccccgggatagcacgcccaggccctgtgcaaggcctctggcacttaggagaggcttttgcccctttgtcctctgagcagaagggttggcaaagagggaaggggacaggccagttctgcacctggcctttctccagaatgaaggcctccaccacccgtccgttcccacagaaagaaaagtaaactgttttcgcggctgcgcagaaagaagaacatggtaagtgcagtgagtgctgcggaggggcgcagaggcccgcgccctggctggccctgtgcatgcgccttgcgccctgctcccaggtgctcactaacccgtaatctggctctgtgtgcatgtgctgcccggcagggctgtcgtgtgcgtgttgggtgggaaggcggaggcggcgcggggcgggctggcctctgagcatctggctgcatttagcacg

SEQ ID NO: 417 - DNA, 504 bp, Artificial Sequence
  Synthetic
gagcctcctgcccctcaccaggccctgttagcatcacctcgggcacctggccacagcaggggccagtcagggcaccccgggatagcacgcccaggccctgtgcaaggcctctggcacttaggagaggcttttgcccctttgtcctctgagcagaagggttggcaaagagggaaggggacaggccagttctgcacctggcctttctccagaatgaaggcctccaccacccgtccgttcccacagaaagaaaagtaaactgttttcgcggctgcgcagaaagaagaacatggtaagtgcagtgagtgctgcggaggggcgcagaggcccgcgccctggctggccctgtgcatgcgccttgcgccctgctcccaggtgctcactaacccgtaatctgctgctctgtgtgcagtgctgcccggcagggctgtcgtgtgcgtgttgggtgggaaggcggaggcggcgcggggcgggctggcctctgagcatctggctgcatttagcacg

SEQ ID NO: 418 - DNA, 505 bp, Artificial Sequence
  Synthetic
gagcctcctgcccctcaccaggccctgttagcatcacctcgggcacctggccacagcaggggccagtcagggcaccccgggatagcacgcccaggccctgtgcaaggcctctggcacttaggagaggcttttgcccctttgtcctctgagcagaagggttggcaaagagggaaggggacaggccagttctgcacctggcctttctccagaatgaaggcctccaccacccgtccgttcccacagaaagaaaagtaaactgttttcgcggctgcgcagaaagaagaacatggtaagtgcagtgagtgctgcggaggggcgcagaggcccgcgccctggctggccctgtgcatgcgccttgcgccctgctcccaggtgctcactaacccgtaatctgctgctctgtgtgcatgtgctgcccggcagggctgtcgtgtgcgtgttgggtgggaaggcggaggcggcgcggggcgggctggcctctgagcatctggctgcatttagcacg

SEQ ID NO: 419 - DNA, 502 bp, Artificial Sequence
  Synthetic
gagcctcctgcccctcaccaggccctgttagcatcacctcgggcacctggccacagcaggggccagtcagggcaccccgggatagcacgcccaggccctgtgcaaggcctctggcacttaggagaggcttttgcccctttgtcctctgagcagaagggttggcaaagagggaaggggacaggccagttctgcacctggcctttctccagaatgaaggcctccaccacccgtccgttcccacagaaagaaaagtaaactgttttcgcggctgcgcagaaagaagaacatggtaagtgcagtgagtgctgcggaggggcgcagaggcccgcgccctggctggccctgtgcatgctgccttgcgccctgctcccaggtgccactaacccgtaatctggctctgtgtgcagtgctgcccggcagggctgtcgtgtgcgtgttgggtgggaaggcggaggcggcgcggggcgggctggcctctgagcatctggctgcatttagcacg

SEQ ID NO: 420 - DNA, 503 bp, Artificial Sequence
  Synthetic
gagcctcctgcccctcaccaggccctgttagcatcacctcgggcacctggccacagcaggggccagtcagggcaccccgggatagcacgcccaggccctgtgcaaggcctctggcacttaggagaggcttttgcccctttgtcctctgagcagaagggttggcaaagagggaaggggacaggccagttctgcacctggcctttctccagaatgaaggcctccaccacccgtccgttcccacagaaagaaaagtaaactgttttcgcggctgcgcagaaagaagaacatggtaagtgcagtgagtgctgcggaggggcgcagaggcccgcgccctggctggccctgtgcatgctgccttgcgccctgctcccaggtgccactaacccgtaatctggctctgtgtgcatgtgctgcccggcagggctgtcgtgtgcgtgttgggtgggaaggcggaggcggcgcggggcgggctggcctctgagcatctggctgcatttagcacg

SEQ ID NO: 421 - DNA, 504 bp, Artificial Sequence
  Synthetic
gagcctcctgcccctcaccaggccctgttagcatcacctcgggcacctggccacagcaggggccagtcagggcaccccgggatagcacgcccaggccctgtgcaaggcctctggcacttaggagaggcttttgcccctttgtcctctgagcagaagggttggcaaagagggaaggggacaggccagttctgcacctggcctttctccagaatgaaggcctccaccacccgtccgttcccacagaaagaaaagtaaactgttttcgcggctgcgcagaaagaagaacatggtaagtgcagtgagtgctgcggaggggcgcagaggcccgcgccctggctggccctgtgcatgctgccttgcgccctgctcccaggtgccactaacccgtaatctgctgctctgtgtgcagtgctgcccggcagggctgtcgtgtgcgtgttgggtgggaaggcggaggcggcgcggggcgggctggcctctgagcatctggctgcatttagcacg

SEQ ID NO: 422 - DNA, 505 bp, Artificial Sequence
  Synthetic
gagcctcctgcccctcaccaggccctgttagcatcacctcgggcacctggccacagcaggggccagtcagggcaccccgggatagcacgcccaggccctgtgcaaggcctctggcacttaggagaggcttttgcccctttgtcctctgagcagaagggttggcaaagagggaaggggacaggccagttctgcacctggcctttctccagaatgaaggcctccaccacccgtccgttcccacagaaagaaaagtaaactgttttcgcggctgcgcagaaagaagaacatggtaagtgcagtgagtgctgcggaggggcgcagaggcccgcgccctggctggccctgtgcatgctgccttgcgccctgctcccaggtgccactaacccgtaatctgctgctctgtgtgcatgtgctgcccggcagggctgtcgtgtgcgtgttgggtgggaaggcggaggcggcgcggggcgggctggcctctgagcatctggctgcatttagcacg

SEQ ID NO: 423 - DNA, 503 bp, Artificial Sequence
  Synthetic
gagcctcctgcccctcaccaggccctgttagcatcacctcgggcacctggccacagcaggggccagtcagggcaccccgggatagcacgcccaggccctgtgcaaggcctctggcacttaggagaggcttttgcccctttgtcctctgagcagaagggttggcaaagagggaaggggacaggccagttctgcacctggcctttctccagaatgaaggcctccaccacccgtccgttcccacagaaagaaaagtaaactgttttcgcggctgcgcagaaagaagaacatggtaagtgcagtgagtgctgcggaggggcgcagaggcccgcgccctggctggccctgtgcatgctgccttgcgccctgctcccaggtgctcactaacccgtaatctggctctgtgtgcagtgctgcccggcagggctgtcgtgtgcgtgttgggtgggaaggcggaggcggcgcggggcgggctggcctctgagcatctggctgcatttagcacg

SEQ ID NO: 424 - DNA, 504 bp, Artificial Sequence
  Synthetic
gagcctcctgcccctcaccaggccctgttagcatcacctcgggcacctggccacagcaggggccagtcagggcaccccgggatagcacgcccaggccctgtgcaaggcctctggcacttaggagaggcttttgcccctttgtcctctgagcagaagggttggcaaagagggaaggggacaggccagttctgcacctggcctttctccagaatgaaggcctccaccacccgtccgttcccacagaaagaaaagtaaactgttttcgcggctgcgcagaaagaagaacatggtaagtgcagtgagtgctgcggaggggcgcagaggcccgcgccctggctggccctgtgcatgctgccttgcgccctgctcccaggtgctcactaacccgtaatctggctctgtgtgcatgtgctgcccggcagggctgtcgtgtgcgtgttgggtgggaaggcggaggcggcgcggggcgggctggcctctgagcatctggctgcatttagcacg

SEQ ID NO: 425 - DNA, 505 bp, Artificial Sequence
  Synthetic
gagcctcctgcccctcaccaggccctgttagcatcacctcgggcacctggccacagcaggggccagtcagggcaccccgggatagcacgcccaggccctgtgcaaggcctctggcacttaggagaggcttttgcccctttgtcctctgagcagaagggttggcaaagagggaaggggacaggccagttctgcacctggcctttctccagaatgaaggcctccaccacccgtccgttcccacagaaagaaaagtaaactgttttcgcggctgcgcagaaagaagaacatggtaagtgcagtgagtgctgcggaggggcgcagaggcccgcgccctggctggccctgtgcatgctgccttgcgccctgctcccaggtgctcactaacccgtaatctgctgctctgtgtgcagtgctgcccggcagggctgtcgtgtgcgtgttgggtgggaaggcggaggcggcgcggggcgggctggcctctgagcatctggctgcatttagcacg

SEQ ID NO: 426 - DNA, 506 bp, Artificial Sequence
  Synthetic
gagcctcctgcccctcaccaggccctgttagcatcacctcgggcacctggccacagcaggggccagtcagggcaccccgggatagcacgcccaggccctgtgcaaggcctctggcacttaggagaggcttttgcccctttgtcctctgagcagaagggttggcaaagagggaaggggacaggccagttctgcacctggcctttctccagaatgaaggcctccaccacccgtccgttcccacagaaagaaaagtaaactgttttcgcggctgcgcagaaagaagaacatggtaagtgcagtgagtgctgcggaggggcgcagaggcccgcgccctggctggccctgtgcatgctgccttgcgccctgctcccaggtgctcactaacccgtaatctgctgctctgtgtgcatgtgctgcccggcagggctgtcgtgtgcgtgttgggtgggaaggcggaggcggcgcggggcgggctggcctctgagcatctggctgcatttagcacg

SEQ ID NO: 427 - DNA, 501 bp, Artificial Sequence
  Synthetic
gagcctcctgcccctcaccaggccctgttagcatcacctcgggcacctggccacagcaggggccagtcagggcaccccgggatagcacgcccaggccctgtgcaaggcctctggcacttaggagaggcttttgcccctttgtcctctgagcagaagggttggcaaagagggaaggggacaggccagttctgcacctggcctttctccagaatgaaggcctccaccacccgtccgttcccacagaaagaaaagtaaactgttttcgcggctgcgcagaaagaagaacatggtaggtgcagtgagtgctgcggaggggcgcagaggcccgcgccctggctggccctgtgcatgcgccttgcgccctgctcccaggtgccactaacccgtaatctggctctgtgtgcagtgctgcccggcagggctgtcgtgtgcgtgttgggtgggaaggcggaggcggcgcggggcgggctggcctctgagcatctggctgcatttagcacg

SEQ ID NO: 428 - DNA, 502 bp, Artificial Sequence
  Synthetic
gagcctcctgcccctcaccaggccctgttagcatcacctcgggcacctggccacagcaggggccagtcagggcaccccgggatagcacgcccaggccctgtgcaaggcctctggcacttaggagaggcttttgcccctttgtcctctgagcagaagggttggcaaagagggaaggggacaggccagttctgcacctggcctttctccagaatgaaggcctccaccacccgtccgttcccacagaaagaaaagtaaactgttttcgcggctgcgcagaaagaagaacatggtaggtgcagtgagtgctgcggaggggcgcagaggcccgcgccctggctggccctgtgcatgcgccttgcgccctgctcccaggtgccactaacccgtaatctggctctgtgtgcatgtgctgcccggcagggctgtcgtgtgcgtgttgggtgggaaggcggaggcggcgcggggcgggctggcctctgagcatctggctgcatttagcacg

SEQ ID NO: 429 - DNA, 503 bp, Artificial Sequence
  Synthetic
gagcctcctgcccctcaccaggccctgttagcatcacctcgggcacctggccacagcaggggccagtcagggcaccccgggatagcacgcccaggccctgtgcaaggcctctggcacttaggagaggcttttgcccctttgtcctctgagcagaagggttggcaaagagggaaggggacaggccagttctgcacctggcctttctccagaatgaaggcctccaccacccgtccgttcccacagaaagaaaagtaaactgttttcgcggctgcgcagaaagaagaacatggtaggtgcagtgagtgctgcggaggggcgcagaggcccgcgccctggctggccctgtgcatgcgccttgcgccctgctcccaggtgccactaacccgtaatctgctgctctgtgtgcagtgctgcccggcagggctgtcgtgtgcgtgttgggtgggaaggcggaggcggcgcggggcgggctggcctctgagcatctggctgcatttagcacg

SEQ ID NO: 430 - DNA, 504 bp, Artificial Sequence
  Synthetic
gagcctcctgcccctcaccaggccctgttagcatcacctcgggcacctggccacagcaggggccagtcagggcaccccgggatagcacgcccaggccctgtgcaaggcctctggcacttaggagaggcttttgcccctttgtcctctgagcagaagggttggcaaagagggaaggggacaggccagttctgcacctggcctttctccagaatgaaggcctccaccacccgtccgttcccacagaaagaaaagtaaactgttttcgcggctgcgcagaaagaagaacatggtaggtgcagtgagtgctgcggaggggcgcagaggcccgcgccctggctggccctgtgcatgcgccttgcgccctgctcccaggtgccactaacccgtaatctgctgctctgtgtgcatgtgctgcccggcagggctgtcgtgtgcgtgttgggtgggaaggcggaggcggcgcggggcgggctggcctctgagcatctggctgcatttagcacg

SEQ ID NO: 431 - DNA, 502 bp, Artificial Sequence
  Synthetic
gagcctcctgcccctcaccaggccctgttagcatcacctcgggcacctggccacagcaggggccagtcagggcaccccgggatagcacgcccaggccctgtgcaaggcctctggcacttaggagaggcttttgcccctttgtcctctgagcagaagggttggcaaagagggaaggggacaggccagttctgcacctggcctttctccagaatgaaggcctccaccacccgtccgttcccacagaaagaaaagtaaactgttttcgcggctgcgcagaaagaagaacatggtaggtgcagtgagtgctgcggaggggcgcagaggcccgcgccctggctggccctgtgcatgcgccttgcgccctgctcccaggtgctcactaacccgtaatctggctctgtgtgcagtgctgcccggcagggctgtcgtgtgcgtgttgggtgggaaggcggaggcggcgcggggcgggctggcctctgagcatctggctgcatttagcacg

SEQ ID NO: 432 - DNA, 503 bp, Artificial Sequence
  Synthetic
gagcctcctgcccctcaccaggccctgttagcatcacctcgggcacctggccacagcaggggccagtcagggcaccccgggatagcacgcccaggccctgtgcaaggcctctggcacttaggagaggcttttgcccctttgtcctctgagcagaagggttggcaaagagggaaggggacaggccagttctgcacctggcctttctccagaatgaaggcctccaccacccgtccgttcccacagaaagaaaagtaaactgttttcgcggctgcgcagaaagaagaacatggtaggtgcagtgagtgctgcggaggggcgcagaggcccgcgccctggctggccctgtgcatgcgccttgcgccctgctcccaggtgctcactaacccgtaatctggctctgtgtgcatgtgctgcccggcagggctgtcgtgtgcgtgttgggtgggaaggcggaggcggcgcggggcgggctggcctctgagcatctggctgcatttagcacg

SEQ ID NO: 433 - DNA, 504 bp, Artificial Sequence
  Synthetic
gagcctcctgcccctcaccaggccctgttagcatcacctcgggcacctggccacagcaggggccagtcagggcaccccgggatagcacgcccaggccctgtgcaaggcctctggcacttaggagaggcttttgcccctttgtcctctgagcagaagggttggcaaagagggaaggggacaggccagttctgcacctggcctttctccagaatgaaggcctccaccacccgtccgttcccacagaaagaaaagtaaactgttttcgcggctgcgcagaaagaagaacatggtaggtgcagtgagtgctgcggaggggcgcagaggcccgcgccctggctggccctgtgcatgcgccttgcgccctgctcccaggtgctcactaacccgtaatctgctgctctgtgtgcagtgctgcccggcagggctgtcgtgtgcgtgttgggtgggaaggcggaggcggcgcggggcgggctggcctctgagcatctggctgcatttagcacg

SEQ ID NO: 434 - DNA, 505 bp, Artificial Sequence
  Synthetic
gagcctcctgcccctcaccaggccctgttagcatcacctcgggcacctggccacagcaggggccagtcagggcaccccgggatagcacgcccaggccctgtgcaaggcctctggcacttaggagaggcttttgcccctttgtcctctgagcagaagggttggcaaagagggaaggggacaggccagttctgcacctggcctttctccagaatgaaggcctccaccacccgtccgttcccacagaaagaaaagtaaactgttttcgcggctgcgcagaaagaagaacatggtaggtgcagtgagtgctgcggaggggcgcagaggcccgcgccctggctggccctgtgcatgcgccttgcgccctgctcccaggtgctcactaacccgtaatctgctgctctgtgtgcatgtgctgcccggcagggctgtcgtgtgcgtgttgggtgggaaggcggaggcggcgcggggcgggctggcctctgagcatctggctgcatttagcacg

SEQ ID NO: 435 - DNA, 502 bp, Artificial Sequence
  Synthetic
gagcctcctgcccctcaccaggccctgttagcatcacctcgggcacctggccacagcaggggccagtcagggcaccccgggatagcacgcccaggccctgtgcaaggcctctggcacttaggagaggcttttgcccctttgtcctctgagcagaagggttggcaaagagggaaggggacaggccagttctgcacctggcctttctccagaatgaaggcctccaccacccgtccgttcccacagaaagaaaagtaaactgttttcgcggctgcgcagaaagaagaacatggtaggtgcagtgagtgctgcggaggggcgcagaggcccgcgccctggctggccctgtgcatgctgccttgcgccctgctcccaggtgccactaacccgtaatctggctctgtgtgcagtgctgcccggcagggctgtcgtgtgcgtgttgggtgggaaggcggaggcggcgcggggcgggctggcctctgagcatctggctgcatttagcacg

SEQ ID NO: 436 - DNA, 503 bp, Artificial Sequence
  Synthetic
gagcctcctgcccctcaccaggccctgttagcatcacctcgggcacctggccacagcaggggccagtcagggcaccccgggatagcacgcccaggccctgtgcaaggcctctggcacttaggagaggcttttgcccctttgtcctctgagcagaagggttggcaaagagggaaggggacaggccagttctgcacctggcctttctccagaatgaaggcctccaccacccgtccgttcccacagaaagaaaagtaaactgttttcgcggctgcgcagaaagaagaacatggtaggtgcagtgagtgctgcggaggggcgcagaggcccgcgccctggctggccctgtgcatgctgccttgcgccctgctcccaggtgccactaacccgtaatctggctctgtgtgcatgtgctgcccggcagggctgtcgtgtgcgtgttgggtgggaaggcggaggcggcgcggggcgggctggcctctgagcatctggctgcatttagcacg

SEQ ID NO: 437 - DNA, 504 bp, Artificial Sequence
  Synthetic
gagcctcctgcccctcaccaggccctgttagcatcacctcgggcacctggccacagcaggggccagtcagggcaccccgggatagcacgcccaggccctgtgcaaggcctctggcacttaggagaggcttttgcccctttgtcctctgagcagaagggttggcaaagagggaaggggacaggccagttctgcacctggcctttctccagaatgaaggcctccaccacccgtccgttcccacagaaagaaaagtaaactgttttcgcggctgcgcagaaagaagaacatggtaggtgcagtgagtgctgcggaggggcgcagaggcccgcgccctggctggccctgtgcatgctgccttgcgccctgctcccaggtgccactaacccgtaatctgctgctctgtgtgcagtgctgcccggcagggctgtcgtgtgcgtgttgggtgggaaggcggaggcggcgcggggcgggctggcctctgagcatctggctgcatttagcacg

SEQ ID NO: 438 - DNA, 505 bp, Artificial Sequence
  Synthetic
gagcctcctgcccctcaccaggccctgttagcatcacctcgggcacctggccacagcaggggccagtcagggcaccccgggatagcacgcccaggccctgtgcaaggcctctggcacttaggagaggcttttgcccctttgtcctctgagcagaagggttggcaaagagggaaggggacaggccagttctgcacctggcctttctccagaatgaaggcctccaccacccgtccgttcccacagaaagaaaagtaaactgttttcgcggctgcgcagaaagaagaacatggtaggtgcagtgagtgctgcggaggggcgcagaggcccgcgccctggctggccctgtgcatgctgccttgcgccctgctcccaggtgccactaacccgtaatctgctgctctgtgtgcatgtgctgcccggcagggctgtcgtgtgcgtgttgggtgggaaggcggaggcggcgcggggcgggctggcctctgagcatctggctgcatttagcacg

SEQ ID NO: 439 - DNA, 503 bp, Artificial Sequence
  Synthetic
gagcctcctgcccctcaccaggccctgttagcatcacctcgggcacctggccacagcaggggccagtcagggcaccccgggatagcacgcccaggccctgtgcaaggcctctggcacttaggagaggcttttgcccctttgtcctctgagcagaagggttggcaaagagggaaggggacaggccagttctgcacctggcctttctccagaatgaaggcctccaccacccgtccgttcccacagaaagaaaagtaaactgttttcgcggctgcgcagaaagaagaacatggtaggtgcagtgagtgctgcggaggggcgcagaggcccgcgccctggctggccctgtgcatgctgccttgcgccctgctcccaggtgctcactaacccgtaatctggctctgtgtgcagtgctgcccggcagggctgtcgtgtgcgtgttgggtgggaaggcggaggcggcgcggggcgggctggcctctgagcatctggctgcatttagcacg

SEQ ID NO: 440 - DNA, 504 bp, Artificial Sequence
  Synthetic
gagcctcctgcccctcaccaggccctgttagcatcacctcgggcacctggccacagcaggggccagtcagggcaccccgggatagcacgcccaggccctgtgcaaggcctctggcacttaggagaggcttttgcccctttgtcctctgagcagaagggttggcaaagagggaaggggacaggccagttctgcacctggcctttctccagaatgaaggcctccaccacccgtccgttcccacagaaagaaaagtaaactgttttcgcggctgcgcagaaagaagaacatggtaggtgcagtgagtgctgcggaggggcgcagaggcccgcgccctggctggccctgtgcatgctgccttgcgccctgctcccaggtgctcactaacccgtaatctggctctgtgtgcatgtgctgcccggcagggctgtcgtgtgcgtgttgggtgggaaggcggaggcggcgcggggcgggctggcctctgagcatctggctgcatttagcacg

SEQ ID NO: 441 - DNA, 505 bp, Artificial Sequence
  Synthetic
gagcctcctgcccctcaccaggccctgttagcatcacctcgggcacctggccacagcaggggccagtcagggcaccccgggatagcacgcccaggccctgtgcaaggcctctggcacttaggagaggcttttgcccctttgtcctctgagcagaagggttggcaaagagggaaggggacaggccagttctgcacctggcctttctccagaatgaaggcctccaccacccgtccgttcccacagaaagaaaagtaaactgttttcgcggctgcgcagaaagaagaacatggtaggtgcagtgagtgctgcggaggggcgcagaggcccgcgccctggctggccctgtgcatgctgccttgcgccctgctcccaggtgctcactaacccgtaatctgctgctctgtgtgcagtgctgcccggcagggctgtcgtgtgcgtgttgggtgggaaggcggaggcggcgcggggcgggctggcctctgagcatctggctgcatttagcacg

SEQ ID NO: 442 - DNA, 506 bp, Artificial Sequence
  Synthetic
gagcctcctgcccctcaccaggccctgttagcatcacctcgggcacctggccacagcaggggccagtcagggcaccccgggatagcacgcccaggccctgtgcaaggcctctggcacttaggagaggcttttgcccctttgtcctctgagcagaagggttggcaaagagggaaggggacaggccagttctgcacctggcctttctccagaatgaaggcctccaccacccgtccgttcccacagaaagaaaagtaaactgttttcgcggctgcgcagaaagaagaacatggtaggtgcagtgagtgctgcggaggggcgcagaggcccgcgccctggctggccctgtgcatgctgccttgcgccctgctcccaggtgctcactaacccgtaatctgctgctctgtgtgcatgtgctgcccggcagggctgtcgtgtgcgtgttgggtgggaaggcggaggcggcgcggggcgggctggcctctgagcatctggctgcatttagcacg

SEQ ID NO: 443 - DNA, 501 bp, Artificial Sequence
  Synthetic
gagcctcctgcccctcaccaggccctgttagcatcacctcgggcacctggccacagcaggggccagtcagggcaccccgggatagcacgcccaggccctgtgcaaggcctctggcacttaggagaggcttttgcccctttgtcctctgagcagaagggttggcaaagagggaaggggacaggccagttctgcacctggcctttctccagaatgaaggcctccaccacccgtccgttcccacagaaagaaaagtaaactgttttcgcggctgcgcagaaagaagaacatggtatgtgcagtgagtgctgcggaggggcgcagaggcccgcgccctggctggccctgtgcatgcgccttgcgccctgctcccaggtgccactaacccgtaatctggctctgtgtgcagtgctgcccggcagggctgtcgtgtgcgtgttgggtgggaaggcggaggcggcgcggggcgggctggcctctgagcatctggctgcatttagcacg

SEQ ID NO: 444 - DNA, 502 bp, Artificial Sequence
  Synthetic
gagcctcctgcccctcaccaggccctgttagcatcacctcgggcacctggccacagcaggggccagtcagggcaccccgggatagcacgcccaggccctgtgcaaggcctctggcacttaggagaggcttttgcccctttgtcctctgagcagaagggttggcaaagagggaaggggacaggccagttctgcacctggcctttctccagaatgaaggcctccaccacccgtccgttcccacagaaagaaaagtaaactgttttcgcggctgcgcagaaagaagaacatggtatgtgcagtgagtgctgcggaggggcgcagaggcccgcgccctggctggccctgtgcatgcgccttgcgccctgctcccaggtgccactaacccgtaatctggctctgtgtgcatgtgctgcccggcagggctgtcgtgtgcgtgttgggtgggaaggcggaggcggcgcggggcgggctggcctctgagcatctggctgcatttagcacg

SEQ ID NO: 445 - DNA, 503 bp, Artificial Sequence
  Synthetic
gagcctcctgcccctcaccaggccctgttagcatcacctcgggcacctggccacagcaggggccagtcagggcaccccgggatagcacgcccaggccctgtgcaaggcctctggcacttaggagaggcttttgcccctttgtcctctgagcagaagggttggcaaagagggaaggggacaggccagttctgcacctggcctttctccagaatgaaggcctccaccacccgtccgttcccacagaaagaaaagtaaactgttttcgcggctgcgcagaaagaagaacatggtatgtgcagtgagtgctgcggaggggcgcagaggcccgcgccctggctggccctgtgcatgcgccttgcgccctgctcccaggtgccactaacccgtaatctgctgctctgtgtgcagtgctgcccggcagggctgtcgtgtgcgtgttgggtgggaaggcggaggcggcgcggggcgggctggcctctgagcatctggctgcatttagcacg

SEQ ID NO: 446 - DNA, 504 bp, Artificial Sequence
  Synthetic
gagcctcctgcccctcaccaggccctgttagcatcacctcgggcacctggccacagcaggggccagtcagggcaccccgggatagcacgcccaggccctgtgcaaggcctctggcacttaggagaggcttttgcccctttgtcctctgagcagaagggttggcaaagagggaaggggacaggccagttctgcacctggcctttctccagaatgaaggcctccaccacccgtccgttcccacagaaagaaaagtaaactgttttcgcggctgcgcagaaagaagaacatggtatgtgcagtgagtgctgcggaggggcgcagaggcccgcgccctggctggccctgtgcatgcgccttgcgccctgctcccaggtgccactaacccgtaatctgctgctctgtgtgcatgtgctgcccggcagggctgtcgtgtgcgtgttgggtgggaaggcggaggcggcgcggggcgggctggcctctgagcatctggctgcatttagcacg

SEQ ID NO: 447 - DNA, 502 bp, Artificial Sequence
  Synthetic
gagcctcctgcccctcaccaggccctgttagcatcacctcgggcacctggccacagcaggggccagtcagggcaccccgggatagcacgcccaggccctgtgcaaggcctctggcacttaggagaggcttttgcccctttgtcctctgagcagaagggttggcaaagagggaaggggacaggccagttctgcacctggcctttctccagaatgaaggcctccaccacccgtccgttcccacagaaagaaaagtaaactgttttcgcggctgcgcagaaagaagaacatggtatgtgcagtgagtgctgcggaggggcgcagaggcccgcgccctggctggccctgtgcatgcgccttgcgccctgctcccaggtgctcactaacccgtaatctggctctgtgtgcagtgctgcccggcagggctgtcgtgtgcgtgttgggtgggaaggcggaggcggcgcggggcgggctggcctctgagcatctggctgcatttagcacg

SEQ ID NO: 448 - DNA, 503 bp, Artificial Sequence
  Synthetic
gagcctcctgcccctcaccaggccctgttagcatcacctcgggcacctggccacagcaggggccagtcagggcaccccgggatagcacgcccaggccctgtgcaaggcctctggcacttaggagaggcttttgcccctttgtcctctgagcagaagggttggcaaagagggaaggggacaggccagttctgcacctggcctttctccagaatgaaggcctccaccacccgtccgttcccacagaaagaaaagtaaactgttttcgcggctgcgcagaaagaagaacatggtatgtgcagtgagtgctgcggaggggcgcagaggcccgcgccctggctggccctgtgcatgcgccttgcgccctgctcccaggtgctcactaacccgtaatctggctctgtgtgcatgtgctgcccggcagggctgtcgtgtgcgtgttgggtgggaaggcggaggcggcgcggggcgggctggcctctgagcatctggctgcatttagcacg

SEQ ID NO: 449 - DNA, 504 bp, Artificial Sequence
  Synthetic
gagcctcctgcccctcaccaggccctgttagcatcacctcgggcacctggccacagcaggggccagtcagggcaccccgggatagcacgcccaggccctgtgcaaggcctctggcacttaggagaggcttttgcccctttgtcctctgagcagaagggttggcaaagagggaaggggacaggccagttctgcacctggcctttctccagaatgaaggcctccaccacccgtccgttcccacagaaagaaaagtaaactgttttcgcggctgcgcagaaagaagaacatggtatgtgcagtgagtgctgcggaggggcgcagaggcccgcgccctggctggccctgtgcatgcgccttgcgccctgctcccaggtgctcactaacccgtaatctgctgctctgtgtgcagtgctgcccggcagggctgtcgtgtgcgtgttgggtgggaaggcggaggcggcgcggggcgggctggcctctgagcatctggctgcatttagcacg

SEQ ID NO: 450 - DNA, 505 bp, Artificial Sequence
  Synthetic
gagcctcctgcccctcaccaggccctgttagcatcacctcgggcacctggccacagcaggggccagtcagggcaccccgggatagcacgcccaggccctgtgcaaggcctctggcacttaggagaggcttttgcccctttgtcctctgagcagaagggttggcaaagagggaaggggacaggccagttctgcacctggcctttctccagaatgaaggcctccaccacccgtccgttcccacagaaagaaaagtaaactgttttcgcggctgcgcagaaagaagaacatggtatgtgcagtgagtgctgcggaggggcgcagaggcccgcgccctggctggccctgtgcatgcgccttgcgccctgctcccaggtgctcactaacccgtaatctgctgctctgtgtgcatgtgctgcccggcagggctgtcgtgtgcgtgttgggtgggaaggcggaggcggcgcggggcgggctggcctctgagcatctggctgcatttagcacg

SEQ ID NO: 451 - DNA, 502 bp, Artificial Sequence
  Synthetic
gagcctcctgcccctcaccaggccctgttagcatcacctcgggcacctggccacagcaggggccagtcagggcaccccgggatagcacgcccaggccctgtgcaaggcctctggcacttaggagaggcttttgcccctttgtcctctgagcagaagggttggcaaagagggaaggggacaggccagttctgcacctggcctttctccagaatgaaggcctccaccacccgtccgttcccacagaaagaaaagtaaactgttttcgcggctgcgcagaaagaagaacatggtatgtgcagtgagtgctgcggaggggcgcagaggcccgcgccctggctggccctgtgcatgctgccttgcgccctgctcccaggtgccactaacccgtaatctggctctgtgtgcagtgctgcccggcagggctgtcgtgtgcgtgttgggtgggaaggcggaggcggcgcggggcgggctggcctctgagcatctggctgcatttagcacg

SEQ ID NO: 452 - DNA, 503 bp, Artificial Sequence
  Synthetic
gagcctcctgcccctcaccaggccctgttagcatcacctcgggcacctggccacagcaggggccagtcagggcaccccgggatagcacgcccaggccctgtgcaaggcctctggcacttaggagaggcttttgcccctttgtcctctgagcagaagggttggcaaagagggaaggggacaggccagttctgcacctggcctttctccagaatgaaggcctccaccacccgtccgttcccacagaaagaaaagtaaactgttttcgcggctgcgcagaaagaagaacatggtatgtgcagtgagtgctgcggaggggcgcagaggcccgcgccctggctggccctgtgcatgctgccttgcgccctgctcccaggtgccactaacccgtaatctggctctgtgtgcatgtgctgcccggcagggctgtcgtgtgcgtgttgggtgggaaggcggaggcggcgcggggcgggctggcctctgagcatctggctgcatttagcacg

SEQ ID NO: 453 - DNA, 504 bp, Artificial Sequence
  Synthetic
gagcctcctgcccctcaccaggccctgttagcatcacctcgggcacctggccacagcaggggccagtcagggcaccccgggatagcacgcccaggccctgtgcaaggcctctggcacttaggagaggcttttgcccctttgtcctctgagcagaagggttggcaaagagggaaggggacaggccagttctgcacctggcctttctccagaatgaaggcctccaccacccgtccgttcccacagaaagaaaagtaaactgttttcgcggctgcgcagaaagaagaacatggtatgtgcagtgagtgctgcggaggggcgcagaggcccgcgccctggctggccctgtgcatgctgccttgcgccctgctcccaggtgccactaacccgtaatctgctgctctgtgtgcagtgctgcccggcagggctgtcgtgtgcgtgttgggtgggaaggcggaggcggcgcggggcgggctggcctctgagcatctggctgcatttagcacg

SEQ ID NO: 454 - DNA, 505 bp, Artificial Sequence
  Synthetic
gagcctcctgcccctcaccaggccctgttagcatcacctcgggcacctggccacagcaggggccagtcagggcaccccgggatagcacgcccaggccctgtgcaaggcctctggcacttaggagaggcttttgcccctttgtcctctgagcagaagggttggcaaagagggaaggggacaggccagttctgcacctggcctttctccagaatgaaggcctccaccacccgtccgttcccacagaaagaaaagtaaactgttttcgcggctgcgcagaaagaagaacatggtatgtgcagtgagtgctgcggaggggcgcagaggcccgcgccctggctggccctgtgcatgctgccttgcgccctgctcccaggtgccactaacccgtaatctgctgctctgtgtgcatgtgctgcccggcagggctgtcgtgtgcgtgttgggtgggaaggcggaggcggcgcggggcgggctggcctctgagcatctggctgcatttagcacg

SEQ ID NO: 455 - DNA, 503 bp, Artificial Sequence
  Synthetic
gagcctcctgcccctcaccaggccctgttagcatcacctcgggcacctggccacagcaggggccagtcagggcaccccgggatagcacgcccaggccctgtgcaaggcctctggcacttaggagaggcttttgcccctttgtcctctgagcagaagggttggcaaagagggaaggggacaggccagttctgcacctggcctttctccagaatgaaggcctccaccacccgtccgttcccacagaaagaaaagtaaactgttttcgcggctgcgcagaaagaagaacatggtatgtgcagtgagtgctgcggaggggcgcagaggcccgcgccctggctggccctgtgcatgctgccttgcgccctgctcccaggtgctcactaacccgtaatctggctctgtgtgcagtgctgcccggcagggctgtcgtgtgcgtgttgggtgggaaggcggaggcggcgcggggcgggctggcctctgagcatctggctgcatttagcacg

SEQ ID NO: 456 - DNA, 504 bp, Artificial Sequence
  Synthetic
gagcctcctgcccctcaccaggccctgttagcatcacctcgggcacctggccacagcaggggccagtcagggcaccccgggatagcacgcccaggccctgtgcaaggcctctggcacttaggagaggcttttgcccctttgtcctctgagcagaagggttggcaaagagggaaggggacaggccagttctgcacctggcctttctccagaatgaaggcctccaccacccgtccgttcccacagaaagaaaagtaaactgttttcgcggctgcgcagaaagaagaacatggtatgtgcagtgagtgctgcggaggggcgcagaggcccgcgccctggctggccctgtgcatgctgccttgcgccctgctcccaggtgctcactaacccgtaatctggctctgtgtgcatgtgctgcccggcagggctgtcgtgtgcgtgttgggtgggaaggcggaggcggcgcggggcgggctggcctctgagcatctggctgcatttagcacg

SEQ ID NO: 457 - DNA, 505 bp, Artificial Sequence
  Synthetic
gagcctcctgcccctcaccaggccctgttagcatcacctcgggcacctggccacagcaggggccagtcagggcaccccgggatagcacgcccaggccctgtgcaaggcctctggcacttaggagaggcttttgcccctttgtcctctgagcagaagggttggcaaagagggaaggggacaggccagttctgcacctggcctttctccagaatgaaggcctccaccacccgtccgttcccacagaaagaaaagtaaactgttttcgcggctgcgcagaaagaagaacatggtatgtgcagtgagtgctgcggaggggcgcagaggcccgcgccctggctggccctgtgcatgctgccttgcgccctgctcccaggtgctcactaacccgtaatctgctgctctgtgtgcagtgctgcccggcagggctgtcgtgtgcgtgttgggtgggaaggcggaggcggcgcggggcgggctggcctctgagcatctggctgcatttagcacg

SEQ ID NO: 458 - DNA, 506 bp, Artificial Sequence
  Synthetic
gagcctcctgcccctcaccaggccctgttagcatcacctcgggcacctggccacagcaggggccagtcagggcaccccgggatagcacgcccaggccctgtgcaaggcctctggcacttaggagaggcttttgcccctttgtcctctgagcagaagggttggcaaagagggaaggggacaggccagttctgcacctggcctttctccagaatgaaggcctccaccacccgtccgttcccacagaaagaaaagtaaactgttttcgcggctgcgcagaaagaagaacatggtatgtgcagtgagtgctgcggaggggcgcagaggcccgcgccctggctggccctgtgcatgctgccttgcgccctgctcccaggtgctcactaacccgtaatctgctgctctgtgtgcatgtgctgcccggcagggctgtcgtgtgcgtgttgggtgggaaggcggaggcggcgcggggcgggctggcctctgagcatctggctgcatttagcacg

SEQ ID NO: 459 - DNA, 501 bp, Artificial Sequence
  Synthetic
gagcctcctgcccctcaccaggccctgttagcatcacctcgggcacctggccacagcaggggccagtcagggcaccccgggatagcacgcccaggccctgtgcaaggcctctggcacttaggagaggcttttgcccctttgtcctctgagcagaagggttggcaaagagggaaggggacaggccagttctgcacctggcctttctccagaatgaaggcctccaccacccgtccgttcccacagaaagaaaagtaaactgttttcgcggctgcgcagaaagaagaacatggtacgagcagtgagtgctgcggaggggcgcagaggcccgcgccctggctggccctgtgcatgcgccttgcgccctgctcccaggtgccactaacccgtaatctggctctgtgtgcagtgctgcccggcagggctgtcgtgtgcgtgttgggtgggaaggcggaggcggcgcggggcgggctggcctctgagcatctggctgcatttagcacg

SEQ ID NO: 460 - DNA, 502 bp, Artificial Sequence
  Synthetic
gagcctcctgcccctcaccaggccctgttagcatcacctcgggcacctggccacagcaggggccagtcagggcaccccgggatagcacgcccaggccctgtgcaaggcctctggcacttaggagaggcttttgcccctttgtcctctgagcagaagggttggcaaagagggaaggggacaggccagttctgcacctggcctttctccagaatgaaggcctccaccacccgtccgttcccacagaaagaaaagtaaactgttttcgcggctgcgcagaaagaagaacatggtacgagcagtgagtgctgcggaggggcgcagaggcccgcgccctggctggccctgtgcatgcgccttgcgccctgctcccaggtgccactaacccgtaatctggctctgtgtgcatgtgctgcccggcagggctgtcgtgtgcgtgttgggtgggaaggcggaggcggcgcggggcgggctggcctctgagcatctggctgcatttagcacg

SEQ ID NO: 461 - DNA, 503 bp, Artificial Sequence
  Synthetic
gagcctcctgcccctcaccaggccctgttagcatcacctcgggcacctggccacagcaggggccagtcagggcaccccgggatagcacgcccaggccctgtgcaaggcctctggcacttaggagaggcttttgcccctttgtcctctgagcagaagggttggcaaagagggaaggggacaggccagttctgcacctggcctttctccagaatgaaggcctccaccacccgtccgttcccacagaaagaaaagtaaactgttttcgcggctgcgcagaaagaagaacatggtacgagcagtgagtgctgcggaggggcgcagaggcccgcgccctggctggccctgtgcatgcgccttgcgccctgctcccaggtgccactaacccgtaatctgctgctctgtgtgcagtgctgcccggcagggctgtcgtgtgcgtgttgggtgggaaggcggaggcggcgcggggcgggctggcctctgagcatctggctgcatttagcacg

SEQ ID NO: 462 - DNA, 504 bp, Artificial Sequence
  Synthetic
gagcctcctgcccctcaccaggccctgttagcatcacctcgggcacctggccacagcaggggccagtcagggcaccccgggatagcacgcccaggccctgtgcaaggcctctggcacttaggagaggcttttgcccctttgtcctctgagcagaagggttggcaaagagggaaggggacaggccagttctgcacctggcctttctccagaatgaaggcctccaccacccgtccgttcccacagaaagaaaagtaaactgttttcgcggctgcgcagaaagaagaacatggtacgagcagtgagtgctgcggaggggcgcagaggcccgcgccctggctggccctgtgcatgcgccttgcgccctgctcccaggtgccactaacccgtaatctgctgctctgtgtgcatgtgctgcccggcagggctgtcgtgtgcgtgttgggtgggaaggcggaggcggcgcggggcgggctggcctctgagcatctggctgcatttagcacg

SEQ ID NO: 463 - DNA, 502 bp, Artificial Sequence
  Synthetic
gagcctcctgcccctcaccaggccctgttagcatcacctcgggcacctggccacagcaggggccagtcagggcaccccgggatagcacgcccaggccctgtgcaaggcctctggcacttaggagaggcttttgcccctttgtcctctgagcagaagggttggcaaagagggaaggggacaggccagttctgcacctggcctttctccagaatgaaggcctccaccacccgtccgttcccacagaaagaaaagtaaactgttttcgcggctgcgcagaaagaagaacatggtacgagcagtgagtgctgcggaggggcgcagaggcccgcgccctggctggccctgtgcatgcgccttgcgccctgctcccaggtgctcactaacccgtaatctggctctgtgtgcagtgctgcccggcagggctgtcgtgtgcgtgttgggtgggaaggcggaggcggcgcggggcgggctggcctctgagcatctggctgcatttagcacg

SEQ ID NO: 464 - DNA, 503 bp, Artificial Sequence
  Synthetic
gagcctcctgcccctcaccaggccctgttagcatcacctcgggcacctggccacagcaggggccagtcagggcaccccgggatagcacgcccaggccctgtgcaaggcctctggcacttaggagaggcttttgcccctttgtcctctgagcagaagggttggcaaagagggaaggggacaggccagttctgcacctggcctttctccagaatgaaggcctccaccacccgtccgttcccacagaaagaaaagtaaactgttttcgcggctgcgcagaaagaagaacatggtacgagcagtgagtgctgcggaggggcgcagaggcccgcgccctggctggccctgtgcatgcgccttgcgccctgctcccaggtgctcactaacccgtaatctggctctgtgtgcatgtgctgcccggcagggctgtcgtgtgcgtgttgggtgggaaggcggaggcggcgcggggcgggctggcctctgagcatctggctgcatttagcacg

SEQ ID NO: 465 - DNA, 504 bp, Artificial Sequence
  Synthetic
gagcctcctgcccctcaccaggccctgttagcatcacctcgggcacctggccacagcaggggccagtcagggcaccccgggatagcacgcccaggccctgtgcaaggcctctggcacttaggagaggcttttgcccctttgtcctctgagcagaagggttggcaaagagggaaggggacaggccagttctgcacctggcctttctccagaatgaaggcctccaccacccgtccgttcccacagaaagaaaagtaaactgttttcgcggctgcgcagaaagaagaacatggtacgagcagtgagtgctgcggaggggcgcagaggcccgcgccctggctggccctgtgcatgcgccttgcgccctgctcccaggtgctcactaacccgtaatctgctgctctgtgtgcagtgctgcccggcagggctgtcgtgtgcgtgttgggtgggaaggcggaggcggcgcggggcgggctggcctctgagcatctggctgcatttagcacg

SEQ ID NO: 466 - DNA, 505 bp, Artificial Sequence
  Synthetic
gagcctcctgcccctcaccaggccctgttagcatcacctcgggcacctggccacagcaggggccagtcagggcaccccgggatagcacgcccaggccctgtgcaaggcctctggcacttaggagaggcttttgcccctttgtcctctgagcagaagggttggcaaagagggaaggggacaggccagttctgcacctggcctttctccagaatgaaggcctccaccacccgtccgttcccacagaaagaaaagtaaactgttttcgcggctgcgcagaaagaagaacatggtacgagcagtgagtgctgcggaggggcgcagaggcccgcgccctggctggccctgtgcatgcgccttgcgccctgctcccaggtgctcactaacccgtaatctgctgctctgtgtgcatgtgctgcccggcagggctgtcgtgtgcgtgttgggtgggaaggcggaggcggcgcggggcgggctggcctctgagcatctggctgcatttagcacg

SEQ ID NO: 467 - DNA, 502 bp, Artificial Sequence
  Synthetic
gagcctcctgcccctcaccaggccctgttagcatcacctcgggcacctggccacagcaggggccagtcagggcaccccgggatagcacgcccaggccctgtgcaaggcctctggcacttaggagaggcttttgcccctttgtcctctgagcagaagggttggcaaagagggaaggggacaggccagttctgcacctggcctttctccagaatgaaggcctccaccacccgtccgttcccacagaaagaaaagtaaactgttttcgcggctgcgcagaaagaagaacatggtacgagcagtgagtgctgcggaggggcgcagaggcccgcgccctggctggccctgtgcatgctgccttgcgccctgctcccaggtgccactaacccgtaatctggctctgtgtgcagtgctgcccggcagggctgtcgtgtgcgtgttgggtgggaaggcggaggcggcgcggggcgggctggcctctgagcatctggctgcatttagcacg

SEQ ID NO: 468 - DNA, 503 bp, Artificial Sequence
  Synthetic
gagcctcctgcccctcaccaggccctgttagcatcacctcgggcacctggccacagcaggggccagtcagggcaccccgggatagcacgcccaggccctgtgcaaggcctctggcacttaggagaggcttttgcccctttgtcctctgagcagaagggttggcaaagagggaaggggacaggccagttctgcacctggcctttctccagaatgaaggcctccaccacccgtccgttcccacagaaagaaaagtaaactgttttcgcggctgcgcagaaagaagaacatggtacgagcagtgagtgctgcggaggggcgcagaggcccgcgccctggctggccctgtgcatgctgccttgcgccctgctcccaggtgccactaacccgtaatctggctctgtgtgcatgtgctgcccggcagggctgtcgtgtgcgtgttgggtgggaaggcggaggcggcgcggggcgggctggcctctgagcatctggctgcatttagcacg

SEQ ID NO: 469 - DNA, 504 bp, Artificial Sequence
  Synthetic
gagcctcctgcccctcaccaggccctgttagcatcacctcgggcacctggccacagcaggggccagtcagggcaccccgggatagcacgcccaggccctgtgcaaggcctctggcacttaggagaggcttttgcccctttgtcctctgagcagaagggttggcaaagagggaaggggacaggccagttctgcacctggcctttctccagaatgaaggcctccaccacccgtccgttcccacagaaagaaaagtaaactgttttcgcggctgcgcagaaagaagaacatggtacgagcagtgagtgctgcggaggggcgcagaggcccgcgccctggctggccctgtgcatgctgccttgcgccctgctcccaggtgccactaacccgtaatctgctgctctgtgtgcagtgctgcccggcagggctgtcgtgtgcgtgttgggtgggaaggcggaggcggcgcggggcgggctggcctctgagcatctggctgcatttagcacg

SEQ ID NO: 470 - DNA, 505 bp, Artificial Sequence
  Synthetic
gagcctcctgcccctcaccaggccctgttagcatcacctcgggcacctggccacagcaggggccagtcagggcaccccgggatagcacgcccaggccctgtgcaaggcctctggcacttaggagaggcttttgcccctttgtcctctgagcagaagggttggcaaagagggaaggggacaggccagttctgcacctggcctttctccagaatgaaggcctccaccacccgtccgttcccacagaaagaaaagtaaactgttttcgcggctgcgcagaaagaagaacatggtacgagcagtgagtgctgcggaggggcgcagaggcccgcgccctggctggccctgtgcatgctgccttgcgccctgctcccaggtgccactaacccgtaatctgctgctctgtgtgcatgtgctgcccggcagggctgtcgtgtgcgtgttgggtgggaaggcggaggcggcgcggggcgggctggcctctgagcatctggctgcatttagcacg

SEQ ID NO: 471 - DNA, 503 bp, Artificial Sequence
  Synthetic
gagcctcctgcccctcaccaggccctgttagcatcacctcgggcacctggccacagcaggggccagtcagggcaccccgggatagcacgcccaggccctgtgcaaggcctctggcacttaggagaggcttttgcccctttgtcctctgagcagaagggttggcaaagagggaaggggacaggccagttctgcacctggcctttctccagaatgaaggcctccaccacccgtccgttcccacagaaagaaaagtaaactgttttcgcggctgcgcagaaagaagaacatggtacgagcagtgagtgctgcggaggggcgcagaggcccgcgccctggctggccctgtgcatgctgccttgcgccctgctcccaggtgctcactaacccgtaatctggctctgtgtgcagtgctgcccggcagggctgtcgtgtgcgtgttgggtgggaaggcggaggcggcgcggggcgggctggcctctgagcatctggctgcatttagcacg

SEQ ID NO: 472 - DNA, 504 bp, Artificial Sequence
  Synthetic
gagcctcctgcccctcaccaggccctgttagcatcacctcgggcacctggccacagcaggggccagtcagggcaccccgggatagcacgcccaggccctgtgcaaggcctctggcacttaggagaggcttttgcccctttgtcctctgagcagaagggttggcaaagagggaaggggacaggccagttctgcacctggcctttctccagaatgaaggcctccaccacccgtccgttcccacagaaagaaaagtaaactgttttcgcggctgcgcagaaagaagaacatggtacgagcagtgagtgctgcggaggggcgcagaggcccgcgccctggctggccctgtgcatgctgccttgcgccctgctcccaggtgctcactaacccgtaatctggctctgtgtgcatgtgctgcccggcagggctgtcgtgtgcgtgttgggtgggaaggcggaggcggcgcggggcgggctggcctctgagcatctggctgcatttagcacg

SEQ ID NO: 473 - DNA, 505 bp, Artificial Sequence
  Synthetic
gagcctcctgcccctcaccaggccctgttagcatcacctcgggcacctggccacagcaggggccagtcagggcaccccgggatagcacgcccaggccctgtgcaaggcctctggcacttaggagaggcttttgcccctttgtcctctgagcagaagggttggcaaagagggaaggggacaggccagttctgcacctggcctttctccagaatgaaggcctccaccacccgtccgttcccacagaaagaaaagtaaactgttttcgcggctgcgcagaaagaagaacatggtacgagcagtgagtgctgcggaggggcgcagaggcccgcgccctggctggccctgtgcatgctgccttgcgccctgctcccaggtgctcactaacccgtaatctgctgctctgtgtgcagtgctgcccggcagggctgtcgtgtgcgtgttgggtgggaaggcggaggcggcgcggggcgggctggcctctgagcatctggctgcatttagcacg

SEQ ID NO: 474 - DNA, 506 bp, Artificial Sequence
  Synthetic
gagcctcctgcccctcaccaggccctgttagcatcacctcgggcacctggccacagcaggggccagtcagggcaccccgggatagcacgcccaggccctgtgcaaggcctctggcacttaggagaggcttttgcccctttgtcctctgagcagaagggttggcaaagagggaaggggacaggccagttctgcacctggcctttctccagaatgaaggcctccaccacccgtccgttcccacagaaagaaaagtaaactgttttcgcggctgcgcagaaagaagaacatggtacgagcagtgagtgctgcggaggggcgcagaggcccgcgccctggctggccctgtgcatgctgccttgcgccctgctcccaggtgctcactaacccgtaatctgctgctctgtgtgcatgtgctgcccggcagggctgtcgtgtgcgtgttgggtgggaaggcggaggcggcgcggggcgggctggcctctgagcatctggctgcatttagcacg

SEQ ID NO: 475 - DNA, 501 bp, Artificial Sequence
  Synthetic
gagcctcctgcccctcaccaggccctgttagcatcacctcgggcacctggccacagcaggggccagtcagggcaccccgggatagcacgcccaggccctgtgcaaggcctctggcacttaggagaggcttttgcccctttgtcctctgagcagaagggttggcaaagagggaaggggacaggccagttctgcacctggcctttctccagaatgaaggcctccaccacccgtccgttcccacagaaagaaaagtaaactgttttcgcggctgcgcagaaagaagaacatggttcgtgcagtgagtgctgcggaggggcgcagaggcccgcgccctggctggccctgtgcatgcgccttgcgccctgctcccaggtgccactaacccgtaatctggctctgtgtgcagtgctgcccggcagggctgtcgtgtgcgtgttgggtgggaaggcggaggcggcgcggggcgggctggcctctgagcatctggctgcatttagcacg

SEQ ID NO: 476 - DNA, 502 bp, Artificial Sequence
  Synthetic
gagcctcctgcccctcaccaggccctgttagcatcacctcgggcacctggccacagcaggggccagtcagggcaccccgggatagcacgcccaggccctgtgcaaggcctctggcacttaggagaggcttttgcccctttgtcctctgagcagaagggttggcaaagagggaaggggacaggccagttctgcacctggcctttctccagaatgaaggcctccaccacccgtccgttcccacagaaagaaaagtaaactgttttcgcggctgcgcagaaagaagaacatggttcgtgcagtgagtgctgcggaggggcgcagaggcccgcgccctggctggccctgtgcatgcgccttgcgccctgctcccaggtgccactaacccgtaatctggctctgtgtgcatgtgctgcccggcagggctgtcgtgtgcgtgttgggtgggaaggcggaggcggcgcggggcgggctggcctctgagcatctggctgcatttagcacg

SEQ ID NO: 477 - DNA, 503 bp, Artificial Sequence
  Synthetic
gagcctcctgcccctcaccaggccctgttagcatcacctcgggcacctggccacagcaggggccagtcagggcaccccgggatagcacgcccaggccctgtgcaaggcctctggcacttaggagaggcttttgcccctttgtcctctgagcagaagggttggcaaagagggaaggggacaggccagttctgcacctggcctttctccagaatgaaggcctccaccacccgtccgttcccacagaaagaaaagtaaactgttttcgcggctgcgcagaaagaagaacatggttcgtgcagtgagtgctgcggaggggcgcagaggcccgcgccctggctggccctgtgcatgcgccttgcgccctgctcccaggtgccactaacccgtaatctgctgctctgtgtgcagtgctgcccggcagggctgtcgtgtgcgtgttgggtgggaaggcggaggcggcgcggggcgggctggcctctgagcatctggctgcatttagcacg

SEQ ID NO: 478 - DNA, 504 bp, Artificial Sequence
  Synthetic
gagcctcctgcccctcaccaggccctgttagcatcacctcgggcacctggccacagcaggggccagtcagggcaccccgggatagcacgcccaggccctgtgcaaggcctctggcacttaggagaggcttttgcccctttgtcctctgagcagaagggttggcaaagagggaaggggacaggccagttctgcacctggcctttctccagaatgaaggcctccaccacccgtccgttcccacagaaagaaaagtaaactgttttcgcggctgcgcagaaagaagaacatggttcgtgcagtgagtgctgcggaggggcgcagaggcccgcgccctggctggccctgtgcatgcgccttgcgccctgctcccaggtgccactaacccgtaatctgctgctctgtgtgcatgtgctgcccggcagggctgtcgtgtgcgtgttgggtgggaaggcggaggcggcgcggggcgggctggcctctgagcatctggctgcatttagcacg

SEQ ID NO: 479 - DNA, 502 bp, Artificial Sequence
  Synthetic
gagcctcctgcccctcaccaggccctgttagcatcacctcgggcacctggccacagcaggggccagtcagggcaccccgggatagcacgcccaggccctgtgcaaggcctctggcacttaggagaggcttttgcccctttgtcctctgagcagaagggttggcaaagagggaaggggacaggccagttctgcacctggcctttctccagaatgaaggcctccaccacccgtccgttcccacagaaagaaaagtaaactgttttcgcggctgcgcagaaagaagaacatggttcgtgcagtgagtgctgcggaggggcgcagaggcccgcgccctggctggccctgtgcatgcgccttgcgccctgctcccaggtgctcactaacccgtaatctggctctgtgtgcagtgctgcccggcagggctgtcgtgtgcgtgttgggtgggaaggcggaggcggcgcggggcgggctggcctctgagcatctggctgcatttagcacg

SEQ ID NO: 480 - DNA, 503 bp, Artificial Sequence
  Synthetic
gagcctcctgcccctcaccaggccctgttagcatcacctcgggcacctggccacagcaggggccagtcagggcaccccgggatagcacgcccaggccctgtgcaaggcctctggcacttaggagaggcttttgcccctttgtcctctgagcagaagggttggcaaagagggaaggggacaggccagttctgcacctggcctttctccagaatgaaggcctccaccacccgtccgttcccacagaaagaaaagtaaactgttttcgcggctgcgcagaaagaagaacatggttcgtgcagtgagtgctgcggaggggcgcagaggcccgcgccctggctggccctgtgcatgcgccttgcgccctgctcccaggtgctcactaacccgtaatctggctctgtgtgcatgtgctgcccggcagggctgtcgtgtgcgtgttgggtgggaaggcggaggcggcgcggggcgggctggcctctgagcatctggctgcatttagcacg

SEQ ID NO: 481 - DNA, 504 bp, Artificial Sequence
  Synthetic
gagcctcctgcccctcaccaggccctgttagcatcacctcgggcacctggccacagcaggggccagtcagggcaccccgggatagcacgcccaggccctgtgcaaggcctctggcacttaggagaggcttttgcccctttgtcctctgagcagaagggttggcaaagagggaaggggacaggccagttctgcacctggcctttctccagaatgaaggcctccaccacccgtccgttcccacagaaagaaaagtaaactgttttcgcggctgcgcagaaagaagaacatggttcgtgcagtgagtgctgcggaggggcgcagaggcccgcgccctggctggccctgtgcatgcgccttgcgccctgctcccaggtgctcactaacccgtaatctgctgctctgtgtgcagtgctgcccggcagggctgtcgtgtgcgtgttgggtgggaaggcggaggcggcgcggggcgggctggcctctgagcatctggctgcatttagcacg

SEQ ID NO: 482 - DNA, 505 bp, Artificial Sequence
  Synthetic
gagcctcctgcccctcaccaggccctgttagcatcacctcgggcacctggccacagcaggggccagtcagggcaccccgggatagcacgcccaggccctgtgcaaggcctctggcacttaggagaggcttttgcccctttgtcctctgagcagaagggttggcaaagagggaaggggacaggccagttctgcacctggcctttctccagaatgaaggcctccaccacccgtccgttcccacagaaagaaaagtaaactgttttcgcggctgcgcagaaagaagaacatggttcgtgcagtgagtgctgcggaggggcgcagaggcccgcgccctggctggccctgtgcatgcgccttgcgccctgctcccaggtgctcactaacccgtaatctgctgctctgtgtgcatgtgctgcccggcagggctgtcgtgtgcgtgttgggtgggaaggcggaggcggcgcggggcgggctggcctctgagcatctggctgcatttagcacg

SEQ ID NO: 483 - DNA, 502 bp, Artificial Sequence
  Synthetic
gagcctcctgcccctcaccaggccctgttagcatcacctcgggcacctggccacagcaggggccagtcagggcaccccgggatagcacgcccaggccctgtgcaaggcctctggcacttaggagaggcttttgcccctttgtcctctgagcagaagggttggcaaagagggaaggggacaggccagttctgcacctggcctttctccagaatgaaggcctccaccacccgtccgttcccacagaaagaaaagtaaactgttttcgcggctgcgcagaaagaagaacatggttcgtgcagtgagtgctgcggaggggcgcagaggcccgcgccctggctggccctgtgcatgctgccttgcgccctgctcccaggtgccactaacccgtaatctggctctgtgtgcagtgctgcccggcagggctgtcgtgtgcgtgttgggtgggaaggcggaggcggcgcggggcgggctggcctctgagcatctggctgcatttagcacg

SEQ ID NO: 484 - DNA, 503 bp, Artificial Sequence
  Synthetic
gagcctcctgcccctcaccaggccctgttagcatcacctcgggcacctggccacagcaggggccagtcagggcaccccgggatagcacgcccaggccctgtgcaaggcctctggcacttaggagaggcttttgcccctttgtcctctgagcagaagggttggcaaagagggaaggggacaggccagttctgcacctggcctttctccagaatgaaggcctccaccacccgtccgttcccacagaaagaaaagtaaactgttttcgcggctgcgcagaaagaagaacatggttcgtgcagtgagtgctgcggaggggcgcagaggcccgcgccctggctggccctgtgcatgctgccttgcgccctgctcccaggtgccactaacccgtaatctggctctgtgtgcatgtgctgcccggcagggctgtcgtgtgcgtgttgggtgggaaggcggaggcggcgcggggcgggctggcctctgagcatctggctgcatttagcacg

SEQ ID NO: 485 - DNA, 504 bp, Artificial Sequence
  Synthetic
gagcctcctgcccctcaccaggccctgttagcatcacctcgggcacctggccacagcaggggccagtcagggcaccccgggatagcacgcccaggccctgtgcaaggcctctggcacttaggagaggcttttgcccctttgtcctctgagcagaagggttggcaaagagggaaggggacaggccagttctgcacctggcctttctccagaatgaaggcctccaccacccgtccgttcccacagaaagaaaagtaaactgttttcgcggctgcgcagaaagaagaacatggttcgtgcagtgagtgctgcggaggggcgcagaggcccgcgccctggctggccctgtgcatgctgccttgcgccctgctcccaggtgccactaacccgtaatctgctgctctgtgtgcagtgctgcccggcagggctgtcgtgtgcgtgttgggtgggaaggcggaggcggcgcggggcgggctggcctctgagcatctggctgcatttagcacg

SEQ ID NO: 486 - DNA, 505 bp, Artificial Sequence
  Synthetic
gagcctcctgcccctcaccaggccctgttagcatcacctcgggcacctggccacagcaggggccagtcagggcaccccgggatagcacgcccaggccctgtgcaaggcctctggcacttaggagaggcttttgcccctttgtcctctgagcagaagggttggcaaagagggaaggggacaggccagttctgcacctggcctttctccagaatgaaggcctccaccacccgtccgttcccacagaaagaaaagtaaactgttttcgcggctgcgcagaaagaagaacatggttcgtgcagtgagtgctgcggaggggcgcagaggcccgcgccctggctggccctgtgcatgctgccttgcgccctgctcccaggtgccactaacccgtaatctgctgctctgtgtgcatgtgctgcccggcagggctgtcgtgtgcgtgttgggtgggaaggcggaggcggcgcggggcgggctggcctctgagcatctggctgcatttagcacg

SEQ ID NO: 487 - DNA, 503 bp, Artificial Sequence
  Synthetic
gagcctcctgcccctcaccaggccctgttagcatcacctcgggcacctggccacagcaggggccagtcagggcaccccgggatagcacgcccaggccctgtgcaaggcctctggcacttaggagaggcttttgcccctttgtcctctgagcagaagggttggcaaagagggaaggggacaggccagttctgcacctggcctttctccagaatgaaggcctccaccacccgtccgttcccacagaaagaaaagtaaactgttttcgcggctgcgcagaaagaagaacatggttcgtgcagtgagtgctgcggaggggcgcagaggcccgcgccctggctggccctgtgcatgctgccttgcgccctgctcccaggtgctcactaacccgtaatctggctctgtgtgcagtgctgcccggcagggctgtcgtgtgcgtgttgggtgggaaggcggaggcggcgcggggcgggctggcctctgagcatctggctgcatttagcacg

SEQ ID NO: 488 - DNA, 504 bp, Artificial Sequence
  Synthetic
gagcctcctgcccctcaccaggccctgttagcatcacctcgggcacctggccacagcaggggccagtcagggcaccccgggatagcacgcccaggccctgtgcaaggcctctggcacttaggagaggcttttgcccctttgtcctctgagcagaagggttggcaaagagggaaggggacaggccagttctgcacctggcctttctccagaatgaaggcctccaccacccgtccgttcccacagaaagaaaagtaaactgttttcgcggctgcgcagaaagaagaacatggttcgtgcagtgagtgctgcggaggggcgcagaggcccgcgccctggctggccctgtgcatgctgccttgcgccctgctcccaggtgctcactaacccgtaatctggctctgtgtgcatgtgctgcccggcagggctgtcgtgtgcgtgttgggtgggaaggcggaggcggcgcggggcgggctggcctctgagcatctggctgcatttagcacg

SEQ ID NO: 489 - DNA, 505 bp, Artificial Sequence
  Synthetic
gagcctcctgcccctcaccaggccctgttagcatcacctcgggcacctggccacagcaggggccagtcagggcaccccgggatagcacgcccaggccctgtgcaaggcctctggcacttaggagaggcttttgcccctttgtcctctgagcagaagggttggcaaagagggaaggggacaggccagttctgcacctggcctttctccagaatgaaggcctccaccacccgtccgttcccacagaaagaaaagtaaactgttttcgcggctgcgcagaaagaagaacatggttcgtgcagtgagtgctgcggaggggcgcagaggcccgcgccctggctggccctgtgcatgctgccttgcgccctgctcccaggtgctcactaacccgtaatctgctgctctgtgtgcagtgctgcccggcagggctgtcgtgtgcgtgttgggtgggaaggcggaggcggcgcggggcgggctggcctctgagcatctggctgcatttagcacg

SEQ ID NO: 490 - DNA, 506 bp, Artificial Sequence
  Synthetic
gagcctcctgcccctcaccaggccctgttagcatcacctcgggcacctggccacagcaggggccagtcagggcaccccgggatagcacgcccaggccctgtgcaaggcctctggcacttaggagaggcttttgcccctttgtcctctgagcagaagggttggcaaagagggaaggggacaggccagttctgcacctggcctttctccagaatgaaggcctccaccacccgtccgttcccacagaaagaaaagtaaactgttttcgcggctgcgcagaaagaagaacatggttcgtgcagtgagtgctgcggaggggcgcagaggcccgcgccctggctggccctgtgcatgctgccttgcgccctgctcccaggtgctcactaacccgtaatctgctgctctgtgtgcatgtgctgcccggcagggctgtcgtgtgcgtgttgggtgggaaggcggaggcggcgcggggcgggctggcctctgagcatctggctgcatttagcacg

SEQ ID NO: 491 - DNA, 501 bp, Artificial Sequence
  Synthetic
gagcctcctgcccctcaccaggccctgttagcatcacctcgggcacctggccacagcaggggccagtcagggcaccccgggatagcacgcccaggccctgtgcaaggcctctggcacttaggagaggcttttgcccctttgtcctctgagcagaagggttggcaaagagggaaggggacaggccagttctgcacctggcctttctccagaatgaaggcctccacctcccgtcccaccccacagaaagaaaagtaaactgttttcgcggctgcgcagaaagaagaacatggtacgtgcagtgagtgctgcggaggggcgcagaggcccgcgccctggctggccctgtgcatgcgccttgcgccctgctcccaggtgccactaacccgtaatctggctctgtgtgcagtgctgcccggcagggctgtcgtgtgcgtgttgggtgggaaggcggaggcggcgcggggcgggctggcctctgagcatctggctgcatttagcacg

SEQ ID NO: 492 - DNA, 502 bp, Artificial Sequence
  Synthetic
gagcctcctgcccctcaccaggccctgttagcatcacctcgggcacctggccacagcaggggccagtcagggcaccccgggatagcacgcccaggccctgtgcaaggcctctggcacttaggagaggcttttgcccctttgtcctctgagcagaagggttggcaaagagggaaggggacaggccagttctgcacctggcctttctccagaatgaaggcctccacctcccgtcccaccccacagaaagaaaagtaaactgttttcgcggctgcgcagaaagaagaacatggtacgtgcagtgagtgctgcggaggggcgcagaggcccgcgccctggctggccctgtgcatgcgccttgcgccctgctcccaggtgccactaacccgtaatctggctctgtgtgcatgtgctgcccggcagggctgtcgtgtgcgtgttgggtgggaaggcggaggcggcgcggggcgggctggcctctgagcatctggctgcatttagcacg

SEQ ID NO: 493 - DNA, 503 bp, Artificial Sequence
  Synthetic
gagcctcctgcccctcaccaggccctgttagcatcacctcgggcacctggccacagcaggggccagtcagggcaccccgggatagcacgcccaggccctgtgcaaggcctctggcacttaggagaggcttttgcccctttgtcctctgagcagaagggttggcaaagagggaaggggacaggccagttctgcacctggcctttctccagaatgaaggcctccacctcccgtcccaccccacagaaagaaaagtaaactgttttcgcggctgcgcagaaagaagaacatggtacgtgcagtgagtgctgcggaggggcgcagaggcccgcgccctggctggccctgtgcatgcgccttgcgccctgctcccaggtgccactaacccgtaatctgctgctctgtgtgcagtgctgcccggcagggctgtcgtgtgcgtgttgggtgggaaggcggaggcggcgcggggcgggctggcctctgagcatctggctgcatttagcacg

SEQ ID NO: 494 - DNA, 504 bp, Artificial Sequence
  Synthetic
gagcctcctgcccctcaccaggccctgttagcatcacctcgggcacctggccacagcaggggccagtcagggcaccccgggatagcacgcccaggccctgtgcaaggcctctggcacttaggagaggcttttgcccctttgtcctctgagcagaagggttggcaaagagggaaggggacaggccagttctgcacctggcctttctccagaatgaaggcctccacctcccgtcccaccccacagaaagaaaagtaaactgttttcgcggctgcgcagaaagaagaacatggtacgtgcagtgagtgctgcggaggggcgcagaggcccgcgccctggctggccctgtgcatgcgccttgcgccctgctcccaggtgccactaacccgtaatctgctgctctgtgtgcatgtgctgcccggcagggctgtcgtgtgcgtgttgggtgggaaggcggaggcggcgcggggcgggctggcctctgagcatctggctgcatttagcacg

SEQ ID NO: 495 - DNA, 502 bp, Artificial Sequence
  Synthetic
gagcctcctgcccctcaccaggccctgttagcatcacctcgggcacctggccacagcaggggccagtcagggcaccccgggatagcacgcccaggccctgtgcaaggcctctggcacttaggagaggcttttgcccctttgtcctctgagcagaagggttggcaaagagggaaggggacaggccagttctgcacctggcctttctccagaatgaaggcctccacctcccgtcccaccccacagaaagaaaagtaaactgttttcgcggctgcgcagaaagaagaacatggtacgtgcagtgagtgctgcggaggggcgcagaggcccgcgccctggctggccctgtgcatgcgccttgcgccctgctcccaggtgctcactaacccgtaatctggctctgtgtgcagtgctgcccggcagggctgtcgtgtgcgtgttgggtgggaaggcggaggcggcgcggggcgggctggcctctgagcatctggctgcatttagcacg

SEQ ID NO: 496 - DNA, 503 bp, Artificial Sequence
  Synthetic
gagcctcctgcccctcaccaggccctgttagcatcacctcgggcacctggccacagcaggggccagtcagggcaccccgggatagcacgcccaggccctgtgcaaggcctctggcacttaggagaggcttttgcccctttgtcctctgagcagaagggttggcaaagagggaaggggacaggccagttctgcacctggcctttctccagaatgaaggcctccacctcccgtcccaccccacagaaagaaaagtaaactgttttcgcggctgcgcagaaagaagaacatggtacgtgcagtgagtgctgcggaggggcgcagaggcccgcgccctggctggccctgtgcatgcgccttgcgccctgctcccaggtgctcactaacccgtaatctggctctgtgtgcatgtgctgcccggcagggctgtcgtgtgcgtgttgggtgggaaggcggaggcggcgcggggcgggctggcctctgagcatctggctgcatttagcacg

SEQ ID NO: 497 - DNA, 504 bp, Artificial Sequence
  Synthetic
gagcctcctgcccctcaccaggccctgttagcatcacctcgggcacctggccacagcaggggccagtcagggcaccccgggatagcacgcccaggccctgtgcaaggcctctggcacttaggagaggcttttgcccctttgtcctctgagcagaagggttggcaaagagggaaggggacaggccagttctgcacctggcctttctccagaatgaaggcctccacctcccgtcccaccccacagaaagaaaagtaaactgttttcgcggctgcgcagaaagaagaacatggtacgtgcagtgagtgctgcggaggggcgcagaggcccgcgccctggctggccctgtgcatgcgccttgcgccctgctcccaggtgctcactaacccgtaatctgctgctctgtgtgcagtgctgcccggcagggctgtcgtgtgcgtgttgggtgggaaggcggaggcggcgcggggcgggctggcctctgagcatctggctgcatttagcacg

SEQ ID NO: 498 - DNA, 505 bp, Artificial Sequence
  Synthetic
gagcctcctgcccctcaccaggccctgttagcatcacctcgggcacctggccacagcaggggccagtcagggcaccccgggatagcacgcccaggccctgtgcaaggcctctggcacttaggagaggcttttgcccctttgtcctctgagcagaagggttggcaaagagggaaggggacaggccagttctgcacctggcctttctccagaatgaaggcctccacctcccgtcccaccccacagaaagaaaagtaaactgttttcgcggctgcgcagaaagaagaacatggtacgtgcagtgagtgctgcggaggggcgcagaggcccgcgccctggctggccctgtgcatgcgccttgcgccctgctcccaggtgctcactaacccgtaatctgctgctctgtgtgcatgtgctgcccggcagggctgtcgtgtgcgtgttgggtgggaaggcggaggcggcgcggggcgggctggcctctgagcatctggctgcatttagcacg

SEQ ID NO: 499 - DNA, 502 bp, Artificial Sequence
  Synthetic
gagcctcctgcccctcaccaggccctgttagcatcacctcgggcacctggccacagcaggggccagtcagggcaccccgggatagcacgcccaggccctgtgcaaggcctctggcacttaggagaggcttttgcccctttgtcctctgagcagaagggttggcaaagagggaaggggacaggccagttctgcacctggcctttctccagaatgaaggcctccacctcccgtcccaccccacagaaagaaaagtaaactgttttcgcggctgcgcagaaagaagaacatggtacgtgcagtgagtgctgcggaggggcgcagaggcccgcgccctggctggccctgtgcatgctgccttgcgccctgctcccaggtgccactaacccgtaatctggctctgtgtgcagtgctgcccggcagggctgtcgtgtgcgtgttgggtgggaaggcggaggcggcgcggggcgggctggcctctgagcatctggctgcatttagcacg

SEQ ID NO: 500 - DNA, 503 bp, Artificial Sequence
  Synthetic
gagcctcctgcccctcaccaggccctgttagcatcacctcgggcacctggccacagcaggggccagtcagggcaccccgggatagcacgcccaggccctgtgcaaggcctctggcacttaggagaggcttttgcccctttgtcctctgagcagaagggttggcaaagagggaaggggacaggccagttctgcacctggcctttctccagaatgaaggcctccacctcccgtcccaccccacagaaagaaaagtaaactgttttcgcggctgcgcagaaagaagaacatggtacgtgcagtgagtgctgcggaggggcgcagaggcccgcgccctggctggccctgtgcatgctgccttgcgccctgctcccaggtgccactaacccgtaatctggctctgtgtgcatgtgctgcccggcagggctgtcgtgtgcgtgttgggtgggaaggcggaggcggcgcggggcgggctggcctctgagcatctggctgcatttagcacg

SEQ ID NO: 501 - DNA, 504 bp, Artificial Sequence
  Synthetic
gagcctcctgcccctcaccaggccctgttagcatcacctcgggcacctggccacagcaggggccagtcagggcaccccgggatagcacgcccaggccctgtgcaaggcctctggcacttaggagaggcttttgcccctttgtcctctgagcagaagggttggcaaagagggaaggggacaggccagttctgcacctggcctttctccagaatgaaggcctccacctcccgtcccaccccacagaaagaaaagtaaactgttttcgcggctgcgcagaaagaagaacatggtacgtgcagtgagtgctgcggaggggcgcagaggcccgcgccctggctggccctgtgcatgctgccttgcgccctgctcccaggtgccactaacccgtaatctgctgctctgtgtgcagtgctgcccggcagggctgtcgtgtgcgtgttgggtgggaaggcggaggcggcgcggggcgggctggcctctgagcatctggctgcatttagcacg

SEQ ID NO: 502 - DNA, 505 bp, Artificial Sequence
  Synthetic
gagcctcctgcccctcaccaggccctgttagcatcacctcgggcacctggccacagcaggggccagtcagggcaccccgggatagcacgcccaggccctgtgcaaggcctctggcacttaggagaggcttttgcccctttgtcctctgagcagaagggttggcaaagagggaaggggacaggccagttctgcacctggcctttctccagaatgaaggcctccacctcccgtcccaccccacagaaagaaaagtaaactgttttcgcggctgcgcagaaagaagaacatggtacgtgcagtgagtgctgcggaggggcgcagaggcccgcgccctggctggccctgtgcatgctgccttgcgccctgctcccaggtgccactaacccgtaatctgctgctctgtgtgcatgtgctgcccggcagggctgtcgtgtgcgtgttgggtgggaaggcggaggcggcgcggggcgggctggcctctgagcatctggctgcatttagcacg

SEQ ID NO: 503 - DNA, 503 bp, Artificial Sequence
  Synthetic
gagcctcctgcccctcaccaggccctgttagcatcacctcgggcacctggccacagcaggggccagtcagggcaccccgggatagcacgcccaggccctgtgcaaggcctctggcacttaggagaggcttttgcccctttgtcctctgagcagaagggttggcaaagagggaaggggacaggccagttctgcacctggcctttctccagaatgaaggcctccacctcccgtcccaccccacagaaagaaaagtaaactgttttcgcggctgcgcagaaagaagaacatggtacgtgcagtgagtgctgcggaggggcgcagaggcccgcgccctggctggccctgtgcatgctgccttgcgccctgctcccaggtgctcactaacccgtaatctggctctgtgtgcagtgctgcccggcagggctgtcgtgtgcgtgttgggtgggaaggcggaggcggcgcggggcgggctggcctctgagcatctggctgcatttagcacg

SEQ ID NO: 504 - DNA, 504 bp, Artificial Sequence
  Synthetic
gagcctcctgcccctcaccaggccctgttagcatcacctcgggcacctggccacagcaggggccagtcagggcaccccgggatagcacgcccaggccctgtgcaaggcctctggcacttaggagaggcttttgcccctttgtcctctgagcagaagggttggcaaagagggaaggggacaggccagttctgcacctggcctttctccagaatgaaggcctccacctcccgtcccaccccacagaaagaaaagtaaactgttttcgcggctgcgcagaaagaagaacatggtacgtgcagtgagtgctgcggaggggcgcagaggcccgcgccctggctggccctgtgcatgctgccttgcgccctgctcccaggtgctcactaacccgtaatctggctctgtgtgcatgtgctgcccggcagggctgtcgtgtgcgtgttgggtgggaaggcggaggcggcgcggggcgggctggcctctgagcatctggctgcatttagcacg

SEQ ID NO: 505 - DNA, 505 bp, Artificial Sequence
  Synthetic
gagcctcctgcccctcaccaggccctgttagcatcacctcgggcacctggccacagcaggggccagtcagggcaccccgggatagcacgcccaggccctgtgcaaggcctctggcacttaggagaggcttttgcccctttgtcctctgagcagaagggttggcaaagagggaaggggacaggccagttctgcacctggcctttctccagaatgaaggcctccacctcccgtcccaccccacagaaagaaaagtaaactgttttcgcggctgcgcagaaagaagaacatggtacgtgcagtgagtgctgcggaggggcgcagaggcccgcgccctggctggccctgtgcatgctgccttgcgccctgctcccaggtgctcactaacccgtaatctgctgctctgtgtgcagtgctgcccggcagggctgtcgtgtgcgtgttgggtgggaaggcggaggcggcgcggggcgggctggcctctgagcatctggctgcatttagcacg

SEQ ID NO: 506 - DNA, 506 bp, Artificial Sequence
  Synthetic
gagcctcctgcccctcaccaggccctgttagcatcacctcgggcacctggccacagcaggggccagtcagggcaccccgggatagcacgcccaggccctgtgcaaggcctctggcacttaggagaggcttttgcccctttgtcctctgagcagaagggttggcaaagagggaaggggacaggccagttctgcacctggcctttctccagaatgaaggcctccacctcccgtcccaccccacagaaagaaaagtaaactgttttcgcggctgcgcagaaagaagaacatggtacgtgcagtgagtgctgcggaggggcgcagaggcccgcgccctggctggccctgtgcatgctgccttgcgccctgctcccaggtgctcactaacccgtaatctgctgctctgtgtgcatgtgctgcccggcagggctgtcgtgtgcgtgttgggtgggaaggcggaggcggcgcggggcgggctggcctctgagcatctggctgcatttagcacg

SEQ ID NO: 507 - DNA, 501 bp, Artificial Sequence
  Synthetic
gagcctcctgcccctcaccaggccctgttagcatcacctcgggcacctggccacagcaggggccagtcagggcaccccgggatagcacgcccaggccctgtgcaaggcctctggcacttaggagaggcttttgcccctttgtcctctgagcagaagggttggcaaagagggaaggggacaggccagttctgcacctggcctttctccagaatgaaggcctccacctcccgtcccaccccacagaaagaaaagtaaactgttttcgcggctgcgcagaaagaagaacatggtaagtgcagtgagtgctgcggaggggcgcagaggcccgcgccctggctggccctgtgcatgcgccttgcgccctgctcccaggtgccactaacccgtaatctggctctgtgtgcagtgctgcccggcagggctgtcgtgtgcgtgttgggtgggaaggcggaggcggcgcggggcgggctggcctctgagcatctggctgcatttagcacg

SEQ ID NO: 508 - DNA, 502 bp, Artificial Sequence
  Synthetic
gagcctcctgcccctcaccaggccctgttagcatcacctcgggcacctggccacagcaggggccagtcagggcaccccgggatagcacgcccaggccctgtgcaaggcctctggcacttaggagaggcttttgcccctttgtcctctgagcagaagggttggcaaagagggaaggggacaggccagttctgcacctggcctttctccagaatgaaggcctccacctcccgtcccaccccacagaaagaaaagtaaactgttttcgcggctgcgcagaaagaagaacatggtaagtgcagtgagtgctgcggaggggcgcagaggcccgcgccctggctggccctgtgcatgcgccttgcgccctgctcccaggtgccactaacccgtaatctggctctgtgtgcatgtgctgcccggcagggctgtcgtgtgcgtgttgggtgggaaggcggaggcggcgcggggcgggctggcctctgagcatctggctgcatttagcacg

SEQ ID NO: 509 - DNA, 503 bp, Artificial Sequence
  Synthetic
gagcctcctgcccctcaccaggccctgttagcatcacctcgggcacctggccacagcaggggccagtcagggcaccccgggatagcacgcccaggccctgtgcaaggcctctggcacttaggagaggcttttgcccctttgtcctctgagcagaagggttggcaaagagggaaggggacaggccagttctgcacctggcctttctccagaatgaaggcctccacctcccgtcccaccccacagaaagaaaagtaaactgttttcgcggctgcgcagaaagaagaacatggtaagtgcagtgagtgctgcggaggggcgcagaggcccgcgccctggctggccctgtgcatgcgccttgcgccctgctcccaggtgccactaacccgtaatctgctgctctgtgtgcagtgctgcccggcagggctgtcgtgtgcgtgttgggtgggaaggcggaggcggcgcggggcgggctggcctctgagcatctggctgcatttagcacg

SEQ ID NO: 510 - DNA, 504 bp, Artificial Sequence
  Synthetic
gagcctcctgcccctcaccaggccctgttagcatcacctcgggcacctggccacagcaggggccagtcagggcaccccgggatagcacgcccaggccctgtgcaaggcctctggcacttaggagaggcttttgcccctttgtcctctgagcagaagggttggcaaagagggaaggggacaggccagttctgcacctggcctttctccagaatgaaggcctccacctcccgtcccaccccacagaaagaaaagtaaactgttttcgcggctgcgcagaaagaagaacatggtaagtgcagtgagtgctgcggaggggcgcagaggcccgcgccctggctggccctgtgcatgcgccttgcgccctgctcccaggtgccactaacccgtaatctgctgctctgtgtgcatgtgctgcccggcagggctgtcgtgtgcgtgttgggtgggaaggcggaggcggcgcggggcgggctggcctctgagcatctggctgcatttagcacg

SEQ ID NO: 511 - DNA, 502 bp, Artificial Sequence
  Synthetic
gagcctcctgcccctcaccaggccctgttagcatcacctcgggcacctggccacagcaggggccagtcagggcaccccgggatagcacgcccaggccctgtgcaaggcctctggcacttaggagaggcttttgcccctttgtcctctgagcagaagggttggcaaagagggaaggggacaggccagttctgcacctggcctttctccagaatgaaggcctccacctcccgtcccaccccacagaaagaaaagtaaactgttttcgcggctgcgcagaaagaagaacatggtaagtgcagtgagtgctgcggaggggcgcagaggcccgcgccctggctggccctgtgcatgcgccttgcgccctgctcccaggtgctcactaacccgtaatctggctctgtgtgcagtgctgcccggcagggctgtcgtgtgcgtgttgggtgggaaggcggaggcggcgcggggcgggctggcctctgagcatctggctgcatttagcacg

SEQ ID NO: 512 - DNA, 503 bp, Artificial Sequence
  Synthetic
gagcctcctgcccctcaccaggccctgttagcatcacctcgggcacctggccacagcaggggccagtcagggcaccccgggatagcacgcccaggccctgtgcaaggcctctggcacttaggagaggcttttgcccctttgtcctctgagcagaagggttggcaaagagggaaggggacaggccagttctgcacctggcctttctccagaatgaaggcctccacctcccgtcccaccccacagaaagaaaagtaaactgttttcgcggctgcgcagaaagaagaacatggtaagtgcagtgagtgctgcggaggggcgcagaggcccgcgccctggctggccctgtgcatgcgccttgcgccctgctcccaggtgctcactaacccgtaatctggctctgtgtgcatgtgctgcccggcagggctgtcgtgtgcgtgttgggtgggaaggcggaggcggcgcggggcgggctggcctctgagcatctggctgcatttagcacg

SEQ ID NO: 513 - DNA, 504 bp, Artificial Sequence
  Synthetic
gagcctcctgcccctcaccaggccctgttagcatcacctcgggcacctggccacagcaggggccagtcagggcaccccgggatagcacgcccaggccctgtgcaaggcctctggcacttaggagaggcttttgcccctttgtcctctgagcagaagggttggcaaagagggaaggggacaggccagttctgcacctggcctttctccagaatgaaggcctccacctcccgtcccaccccacagaaagaaaagtaaactgttttcgcggctgcgcagaaagaagaacatggtaagtgcagtgagtgctgcggaggggcgcagaggcccgcgccctggctggccctgtgcatgcgccttgcgccctgctcccaggtgctcactaacccgtaatctgctgctctgtgtgcagtgctgcccggcagggctgtcgtgtgcgtgttgggtgggaaggcggaggcggcgcggggcgggctggcctctgagcatctggctgcatttagcacg

SEQ ID NO: 514 - DNA, 505 bp, Artificial Sequence
  Synthetic
gagcctcctgcccctcaccaggccctgttagcatcacctcgggcacctggccacagcaggggccagtcagggcaccccgggatagcacgcccaggccctgtgcaaggcctctggcacttaggagaggcttttgcccctttgtcctctgagcagaagggttggcaaagagggaaggggacaggccagttctgcacctggcctttctccagaatgaaggcctccacctcccgtcccaccccacagaaagaaaagtaaactgttttcgcggctgcgcagaaagaagaacatggtaagtgcagtgagtgctgcggaggggcgcagaggcccgcgccctggctggccctgtgcatgcgccttgcgccctgctcccaggtgctcactaacccgtaatctgctgctctgtgtgcatgtgctgcccggcagggctgtcgtgtgcgtgttgggtgggaaggcggaggcggcgcggggcgggctggcctctgagcatctggctgcatttagcacg

SEQ ID NO: 515 - DNA, 502 bp, Artificial Sequence
  Synthetic
gagcctcctgcccctcaccaggccctgttagcatcacctcgggcacctggccacagcaggggccagtcagggcaccccgggatagcacgcccaggccctgtgcaaggcctctggcacttaggagaggcttttgcccctttgtcctctgagcagaagggttggcaaagagggaaggggacaggccagttctgcacctggcctttctccagaatgaaggcctccacctcccgtcccaccccacagaaagaaaagtaaactgttttcgcggctgcgcagaaagaagaacatggtaagtgcagtgagtgctgcggaggggcgcagaggcccgcgccctggctggccctgtgcatgctgccttgcgccctgctcccaggtgccactaacccgtaatctggctctgtgtgcagtgctgcccggcagggctgtcgtgtgcgtgttgggtgggaaggcggaggcggcgcggggcgggctggcctctgagcatctggctgcatttagcacg

SEQ ID NO: 516 - DNA, 503 bp, Artificial Sequence
  Synthetic
gagcctcctgcccctcaccaggccctgttagcatcacctcgggcacctggccacagcaggggccagtcagggcaccccgggatagcacgcccaggccctgtgcaaggcctctggcacttaggagaggcttttgcccctttgtcctctgagcagaagggttggcaaagagggaaggggacaggccagttctgcacctggcctttctccagaatgaaggcctccacctcccgtcccaccccacagaaagaaaagtaaactgttttcgcggctgcgcagaaagaagaacatggtaagtgcagtgagtgctgcggaggggcgcagaggcccgcgccctggctggccctgtgcatgctgccttgcgccctgctcccaggtgccactaacccgtaatctggctctgtgtgcatgtgctgcccggcagggctgtcgtgtgcgtgttgggtgggaaggcggaggcggcgcggggcgggctggcctctgagcatctggctgcatttagcacg

SEQ ID NO: 517 - DNA, 504 bp, Artificial Sequence
  Synthetic
gagcctcctgcccctcaccaggccctgttagcatcacctcgggcacctggccacagcaggggccagtcagggcaccccgggatagcacgcccaggccctgtgcaaggcctctggcacttaggagaggcttttgcccctttgtcctctgagcagaagggttggcaaagagggaaggggacaggccagttctgcacctggcctttctccagaatgaaggcctccacctcccgtcccaccccacagaaagaaaagtaaactgttttcgcggctgcgcagaaagaagaacatggtaagtgcagtgagtgctgcggaggggcgcagaggcccgcgccctggctggccctgtgcatgctgccttgcgccctgctcccaggtgccactaacccgtaatctgctgctctgtgtgcagtgctgcccggcagggctgtcgtgtgcgtgttgggtgggaaggcggaggcggcgcggggcgggctggcctctgagcatctggctgcatttagcacg

SEQ ID NO: 518 - DNA, 505 bp, Artificial Sequence
  Synthetic
gagcctcctgcccctcaccaggccctgttagcatcacctcgggcacctggccacagcaggggccagtcagggcaccccgggatagcacgcccaggccctgtgcaaggcctctggcacttaggagaggcttttgcccctttgtcctctgagcagaagggttggcaaagagggaaggggacaggccagttctgcacctggcctttctccagaatgaaggcctccacctcccgtcccaccccacagaaagaaaagtaaactgttttcgcggctgcgcagaaagaagaacatggtaagtgcagtgagtgctgcggaggggcgcagaggcccgcgccctggctggccctgtgcatgctgccttgcgccctgctcccaggtgccactaacccgtaatctgctgctctgtgtgcatgtgctgcccggcagggctgtcgtgtgcgtgttgggtgggaaggcggaggcggcgcggggcgggctggcctctgagcatctggctgcatttagcacg

SEQ ID NO: 519 - DNA, 503 bp, Artificial Sequence
  Synthetic
gagcctcctgcccctcaccaggccctgttagcatcacctcgggcacctggccacagcaggggccagtcagggcaccccgggatagcacgcccaggccctgtgcaaggcctctggcacttaggagaggcttttgcccctttgtcctctgagcagaagggttggcaaagagggaaggggacaggccagttctgcacctggcctttctccagaatgaaggcctccacctcccgtcccaccccacagaaagaaaagtaaactgttttcgcggctgcgcagaaagaagaacatggtaagtgcagtgagtgctgcggaggggcgcagaggcccgcgccctggctggccctgtgcatgctgccttgcgccctgctcccaggtgctcactaacccgtaatctggctctgtgtgcagtgctgcccggcagggctgtcgtgtgcgtgttgggtgggaaggcggaggcggcgcggggcgggctggcctctgagcatctggctgcatttagcacg

SEQ ID NO: 520 - DNA, 504 bp, Artificial Sequence
  Synthetic
gagcctcctgcccctcaccaggccctgttagcatcacctcgggcacctggccacagcaggggccagtcagggcaccccgggatagcacgcccaggccctgtgcaaggcctctggcacttaggagaggcttttgcccctttgtcctctgagcagaagggttggcaaagagggaaggggacaggccagttctgcacctggcctttctccagaatgaaggcctccacctcccgtcccaccccacagaaagaaaagtaaactgttttcgcggctgcgcagaaagaagaacatggtaagtgcagtgagtgctgcggaggggcgcagaggcccgcgccctggctggccctgtgcatgctgccttgcgccctgctcccaggtgctcactaacccgtaatctggctctgtgtgcatgtgctgcccggcagggctgtcgtgtgcgtgttgggtgggaaggcggaggcggcgcggggcgggctggcctctgagcatctggctgcatttagcacg

SEQ ID NO: 521 - DNA, 505 bp, Artificial Sequence
  Synthetic
gagcctcctgcccctcaccaggccctgttagcatcacctcgggcacctggccacagcaggggccagtcagggcaccccgggatagcacgcccaggccctgtgcaaggcctctggcacttaggagaggcttttgcccctttgtcctctgagcagaagggttggcaaagagggaaggggacaggccagttctgcacctggcctttctccagaatgaaggcctccacctcccgtcccaccccacagaaagaaaagtaaactgttttcgcggctgcgcagaaagaagaacatggtaagtgcagtgagtgctgcggaggggcgcagaggcccgcgccctggctggccctgtgcatgctgccttgcgccctgctcccaggtgctcactaacccgtaatctgctgctctgtgtgcagtgctgcccggcagggctgtcgtgtgcgtgttgggtgggaaggcggaggcggcgcggggcgggctggcctctgagcatctggctgcatttagcacg

SEQ ID NO: 522 - DNA, 506 bp, Artificial Sequence
  Synthetic
gagcctcctgcccctcaccaggccctgttagcatcacctcgggcacctggccacagcaggggccagtcagggcaccccgggatagcacgcccaggccctgtgcaaggcctctggcacttaggagaggcttttgcccctttgtcctctgagcagaagggttggcaaagagggaaggggacaggccagttctgcacctggcctttctccagaatgaaggcctccacctcccgtcccaccccacagaaagaaaagtaaactgttttcgcggctgcgcagaaagaagaacatggtaagtgcagtgagtgctgcggaggggcgcagaggcccgcgccctggctggccctgtgcatgctgccttgcgccctgctcccaggtgctcactaacccgtaatctgctgctctgtgtgcatgtgctgcccggcagggctgtcgtgtgcgtgttgggtgggaaggcggaggcggcgcggggcgggctggcctctgagcatctggctgcatttagcacg

SEQ ID NO: 523 - DNA, 501 bp, Artificial Sequence
  Synthetic
gagcctcctgcccctcaccaggccctgttagcatcacctcgggcacctggccacagcaggggccagtcagggcaccccgggatagcacgcccaggccctgtgcaaggcctctggcacttaggagaggcttttgcccctttgtcctctgagcagaagggttggcaaagagggaaggggacaggccagttctgcacctggcctttctccagaatgaaggcctccacctcccgtcccaccccacagaaagaaaagtaaactgttttcgcggctgcgcagaaagaagaacatggtaggtgcagtgagtgctgcggaggggcgcagaggcccgcgccctggctggccctgtgcatgcgccttgcgccctgctcccaggtgccactaacccgtaatctggctctgtgtgcagtgctgcccggcagggctgtcgtgtgcgtgttgggtgggaaggcggaggcggcgcggggcgggctggcctctgagcatctggctgcatttagcacg

SEQ ID NO: 524 - DNA, 502 bp, Artificial Sequence
  Synthetic
gagcctcctgcccctcaccaggccctgttagcatcacctcgggcacctggccacagcaggggccagtcagggcaccccgggatagcacgcccaggccctgtgcaaggcctctggcacttaggagaggcttttgcccctttgtcctctgagcagaagggttggcaaagagggaaggggacaggccagttctgcacctggcctttctccagaatgaaggcctccacctcccgtcccaccccacagaaagaaaagtaaactgttttcgcggctgcgcagaaagaagaacatggtaggtgcagtgagtgctgcggaggggcgcagaggcccgcgccctggctggccctgtgcatgcgccttgcgccctgctcccaggtgccactaacccgtaatctggctctgtgtgcatgtgctgcccggcagggctgtcgtgtgcgtgttgggtgggaaggcggaggcggcgcggggcgggctggcctctgagcatctggctgcatttagcacg

SEQ ID NO: 525 - DNA, 503 bp, Artificial Sequence
  Synthetic
gagcctcctgcccctcaccaggccctgttagcatcacctcgggcacctggccacagcaggggccagtcagggcaccccgggatagcacgcccaggccctgtgcaaggcctctggcacttaggagaggcttttgcccctttgtcctctgagcagaagggttggcaaagagggaaggggacaggccagttctgcacctggcctttctccagaatgaaggcctccacctcccgtcccaccccacagaaagaaaagtaaactgttttcgcggctgcgcagaaagaagaacatggtaggtgcagtgagtgctgcggaggggcgcagaggcccgcgccctggctggccctgtgcatgcgccttgcgccctgctcccaggtgccactaacccgtaatctgctgctctgtgtgcagtgctgcccggcagggctgtcgtgtgcgtgttgggtgggaaggcggaggcggcgcggggcgggctggcctctgagcatctggctgcatttagcacg

SEQ ID NO: 526 - DNA, 504 bp, Artificial Sequence
  Synthetic
gagcctcctgcccctcaccaggccctgttagcatcacctcgggcacctggccacagcaggggccagtcagggcaccccgggatagcacgcccaggccctgtgcaaggcctctggcacttaggagaggcttttgcccctttgtcctctgagcagaagggttggcaaagagggaaggggacaggccagttctgcacctggcctttctccagaatgaaggcctccacctcccgtcccaccccacagaaagaaaagtaaactgttttcgcggctgcgcagaaagaagaacatggtaggtgcagtgagtgctgcggaggggcgcagaggcccgcgccctggctggccctgtgcatgcgccttgcgccctgctcccaggtgccactaacccgtaatctgctgctctgtgtgcatgtgctgcccggcagggctgtcgtgtgcgtgttgggtgggaaggcggaggcggcgcggggcgggctggcctctgagcatctggctgcatttagcacg

SEQ ID NO: 527 - DNA, 502 bp, Artificial Sequence
  Synthetic
gagcctcctgcccctcaccaggccctgttagcatcacctcgggcacctggccacagcaggggccagtcagggcaccccgggatagcacgcccaggccctgtgcaaggcctctggcacttaggagaggcttttgcccctttgtcctctgagcagaagggttggcaaagagggaaggggacaggccagttctgcacctggcctttctccagaatgaaggcctccacctcccgtcccaccccacagaaagaaaagtaaactgttttcgcggctgcgcagaaagaagaacatggtaggtgcagtgagtgctgcggaggggcgcagaggcccgcgccctggctggccctgtgcatgcgccttgcgccctgctcccaggtgctcactaacccgtaatctggctctgtgtgcagtgctgcccggcagggctgtcgtgtgcgtgttgggtgggaaggcggaggcggcgcggggcgggctggcctctgagcatctggctgcatttagcacg

SEQ ID NO: 528 - DNA, 503 bp, Artificial Sequence
  Synthetic
gagcctcctgcccctcaccaggccctgttagcatcacctcgggcacctggccacagcaggggccagtcagggcaccccgggatagcacgcccaggccctgtgcaaggcctctggcacttaggagaggcttttgcccctttgtcctctgagcagaagggttggcaaagagggaaggggacaggccagttctgcacctggcctttctccagaatgaaggcctccacctcccgtcccaccccacagaaagaaaagtaaactgttttcgcggctgcgcagaaagaagaacatggtaggtgcagtgagtgctgcggaggggcgcagaggcccgcgccctggctggccctgtgcatgcgccttgcgccctgctcccaggtgctcactaacccgtaatctggctctgtgtgcatgtgctgcccggcagggctgtcgtgtgcgtgttgggtgggaaggcggaggcggcgcggggcgggctggcctctgagcatctggctgcatttagcacg

SEQ ID NO: 529 - DNA, 504 bp, Artificial Sequence
  Synthetic
gagcctcctgcccctcaccaggccctgttagcatcacctcgggcacctggccacagcaggggccagtcagggcaccccgggatagcacgcccaggccctgtgcaaggcctctggcacttaggagaggcttttgcccctttgtcctctgagcagaagggttggcaaagagggaaggggacaggccagttctgcacctggcctttctccagaatgaaggcctccacctcccgtcccaccccacagaaagaaaagtaaactgttttcgcggctgcgcagaaagaagaacatggtaggtgcagtgagtgctgcggaggggcgcagaggcccgcgccctggctggccctgtgcatgcgccttgcgccctgctcccaggtgctcactaacccgtaatctgctgctctgtgtgcagtgctgcccggcagggctgtcgtgtgcgtgttgggtgggaaggcggaggcggcgcggggcgggctggcctctgagcatctggctgcatttagcacg

SEQ ID NO: 530 - DNA, 505 bp, Artificial Sequence
  Synthetic
gagcctcctgcccctcaccaggccctgttagcatcacctcgggcacctggccacagcaggggccagtcagggcaccccgggatagcacgcccaggccctgtgcaaggcctctggcacttaggagaggcttttgcccctttgtcctctgagcagaagggttggcaaagagggaaggggacaggccagttctgcacctggcctttctccagaatgaaggcctccacctcccgtcccaccccacagaaagaaaagtaaactgttttcgcggctgcgcagaaagaagaacatggtaggtgcagtgagtgctgcggaggggcgcagaggcccgcgccctggctggccctgtgcatgcgccttgcgccctgctcccaggtgctcactaacccgtaatctgctgctctgtgtgcatgtgctgcccggcagggctgtcgtgtgcgtgttgggtgggaaggcggaggcggcgcggggcgggctggcctctgagcatctggctgcatttagcacg

SEQ ID NO: 531 - DNA, 502 bp, Artificial Sequence
  Synthetic
gagcctcctgcccctcaccaggccctgttagcatcacctcgggcacctggccacagcaggggccagtcagggcaccccgggatagcacgcccaggccctgtgcaaggcctctggcacttaggagaggcttttgcccctttgtcctctgagcagaagggttggcaaagagggaaggggacaggccagttctgcacctggcctttctccagaatgaaggcctccacctcccgtcccaccccacagaaagaaaagtaaactgttttcgcggctgcgcagaaagaagaacatggtaggtgcagtgagtgctgcggaggggcgcagaggcccgcgccctggctggccctgtgcatgctgccttgcgccctgctcccaggtgccactaacccgtaatctggctctgtgtgcagtgctgcccggcagggctgtcgtgtgcgtgttgggtgggaaggcggaggcggcgcggggcgggctggcctctgagcatctggctgcatttagcacg

SEQ ID NO: 532 - DNA, 503 bp, Artificial Sequence
  Synthetic
gagcctcctgcccctcaccaggccctgttagcatcacctcgggcacctggccacagcaggggccagtcagggcaccccgggatagcacgcccaggccctgtgcaaggcctctggcacttaggagaggcttttgcccctttgtcctctgagcagaagggttggcaaagagggaaggggacaggccagttctgcacctggcctttctccagaatgaaggcctccacctcccgtcccaccccacagaaagaaaagtaaactgttttcgcggctgcgcagaaagaagaacatggtaggtgcagtgagtgctgcggaggggcgcagaggcccgcgccctggctggccctgtgcatgctgccttgcgccctgctcccaggtgccactaacccgtaatctggctctgtgtgcatgtgctgcccggcagggctgtcgtgtgcgtgttgggtgggaaggcggaggcggcgcggggcgggctggcctctgagcatctggctgcatttagcacg

SEQ ID NO: 533 - DNA, 504 bp, Artificial Sequence
  Synthetic
gagcctcctgcccctcaccaggccctgttagcatcacctcgggcacctggccacagcaggggccagtcagggcaccccgggatagcacgcccaggccctgtgcaaggcctctggcacttaggagaggcttttgcccctttgtcctctgagcagaagggttggcaaagagggaaggggacaggccagttctgcacctggcctttctccagaatgaaggcctccacctcccgtcccaccccacagaaagaaaagtaaactgttttcgcggctgcgcagaaagaagaacatggtaggtgcagtgagtgctgcggaggggcgcagaggcccgcgccctggctggccctgtgcatgctgccttgcgccctgctcccaggtgccactaacccgtaatctgctgctctgtgtgcagtgctgcccggcagggctgtcgtgtgcgtgttgggtgggaaggcggaggcggcgcggggcgggctggcctctgagcatctggctgcatttagcacg

SEQ ID NO: 534 - DNA, 505 bp, Artificial Sequence
  Synthetic
gagcctcctgcccctcaccaggccctgttagcatcacctcgggcacctggccacagcaggggccagtcagggcaccccgggatagcacgcccaggccctgtgcaaggcctctggcacttaggagaggcttttgcccctttgtcctctgagcagaagggttggcaaagagggaaggggacaggccagttctgcacctggcctttctccagaatgaaggcctccacctcccgtcccaccccacagaaagaaaagtaaactgttttcgcggctgcgcagaaagaagaacatggtaggtgcagtgagtgctgcggaggggcgcagaggcccgcgccctggctggccctgtgcatgctgccttgcgccctgctcccaggtgccactaacccgtaatctgctgctctgtgtgcatgtgctgcccggcagggctgtcgtgtgcgtgttgggtgggaaggcggaggcggcgcggggcgggctggcctctgagcatctggctgcatttagcacg

SEQ ID NO: 535 - DNA, 503 bp, Artificial Sequence
  Synthetic
gagcctcctgcccctcaccaggccctgttagcatcacctcgggcacctggccacagcaggggccagtcagggcaccccgggatagcacgcccaggccctgtgcaaggcctctggcacttaggagaggcttttgcccctttgtcctctgagcagaagggttggcaaagagggaaggggacaggccagttctgcacctggcctttctccagaatgaaggcctccacctcccgtcccaccccacagaaagaaaagtaaactgttttcgcggctgcgcagaaagaagaacatggtaggtgcagtgagtgctgcggaggggcgcagaggcccgcgccctggctggccctgtgcatgctgccttgcgccctgctcccaggtgctcactaacccgtaatctggctctgtgtgcagtgctgcccggcagggctgtcgtgtgcgtgttgggtgggaaggcggaggcggcgcggggcgggctggcctctgagcatctggctgcatttagcacg

SEQ ID NO: 536 - DNA, 504 bp, Artificial Sequence
  Synthetic
gagcctcctgcccctcaccaggccctgttagcatcacctcgggcacctggccacagcaggggccagtcagggcaccccgggatagcacgcccaggccctgtgcaaggcctctggcacttaggagaggcttttgcccctttgtcctctgagcagaagggttggcaaagagggaaggggacaggccagttctgcacctggcctttctccagaatgaaggcctccacctcccgtcccaccccacagaaagaaaagtaaactgttttcgcggctgcgcagaaagaagaacatggtaggtgcagtgagtgctgcggaggggcgcagaggcccgcgccctggctggccctgtgcatgctgccttgcgccctgctcccaggtgctcactaacccgtaatctggctctgtgtgcatgtgctgcccggcagggctgtcgtgtgcgtgttgggtgggaaggcggaggcggcgcggggcgggctggcctctgagcatctggctgcatttagcacg

SEQ ID NO: 537 - DNA, 505 bp, Artificial Sequence
  Synthetic
gagcctcctgcccctcaccaggccctgttagcatcacctcgggcacctggccacagcaggggccagtcagggcaccccgggatagcacgcccaggccctgtgcaaggcctctggcacttaggagaggcttttgcccctttgtcctctgagcagaagggttggcaaagagggaaggggacaggccagttctgcacctggcctttctccagaatgaaggcctccacctcccgtcccaccccacagaaagaaaagtaaactgttttcgcggctgcgcagaaagaagaacatggtaggtgcagtgagtgctgcggaggggcgcagaggcccgcgccctggctggccctgtgcatgctgccttgcgccctgctcccaggtgctcactaacccgtaatctgctgctctgtgtgcagtgctgcccggcagggctgtcgtgtgcgtgttgggtgggaaggcggaggcggcgcggggcgggctggcctctgagcatctggctgcatttagcacg

SEQ ID NO: 538 - DNA, 506 bp, Artificial Sequence
  Synthetic
gagcctcctgcccctcaccaggccctgttagcatcacctcgggcacctggccacagcaggggccagtcagggcaccccgggatagcacgcccaggccctgtgcaaggcctctggcacttaggagaggcttttgcccctttgtcctctgagcagaagggttggcaaagagggaaggggacaggccagttctgcacctggcctttctccagaatgaaggcctccacctcccgtcccaccccacagaaagaaaagtaaactgttttcgcggctgcgcagaaagaagaacatggtaggtgcagtgagtgctgcggaggggcgcagaggcccgcgccctggctggccctgtgcatgctgccttgcgccctgctcccaggtgctcactaacccgtaatctgctgctctgtgtgcatgtgctgcccggcagggctgtcgtgtgcgtgttgggtgggaaggcggaggcggcgcggggcgggctggcctctgagcatctggctgcatttagcacg

SEQ ID NO: 539 - DNA, 501 bp, Artificial Sequence
  Synthetic
gagcctcctgcccctcaccaggccctgttagcatcacctcgggcacctggccacagcaggggccagtcagggcaccccgggatagcacgcccaggccctgtgcaaggcctctggcacttaggagaggcttttgcccctttgtcctctgagcagaagggttggcaaagagggaaggggacaggccagttctgcacctggcctttctccagaatgaaggcctccacctcccgtcccaccccacagaaagaaaagtaaactgttttcgcggctgcgcagaaagaagaacatggtatgtgcagtgagtgctgcggaggggcgcagaggcccgcgccctggctggccctgtgcatgcgccttgcgccctgctcccaggtgccactaacccgtaatctggctctgtgtgcagtgctgcccggcagggctgtcgtgtgcgtgttgggtgggaaggcggaggcggcgcggggcgggctggcctctgagcatctggctgcatttagcacg

SEQ ID NO: 540 - DNA, 502 bp, Artificial Sequence
  Synthetic
gagcctcctgcccctcaccaggccctgttagcatcacctcgggcacctggccacagcaggggccagtcagggcaccccgggatagcacgcccaggccctgtgcaaggcctctggcacttaggagaggcttttgcccctttgtcctctgagcagaagggttggcaaagagggaaggggacaggccagttctgcacctggcctttctccagaatgaaggcctccacctcccgtcccaccccacagaaagaaaagtaaactgttttcgcggctgcgcagaaagaagaacatggtatgtgcagtgagtgctgcggaggggcgcagaggcccgcgccctggctggccctgtgcatgcgccttgcgccctgctcccaggtgccactaacccgtaatctggctctgtgtgcatgtgctgcccggcagggctgtcgtgtgcgtgttgggtgggaaggcggaggcggcgcggggcgggctggcctctgagcatctggctgcatttagcacg

SEQ ID NO: 541 - DNA, 503 bp, Artificial Sequence
  Synthetic
gagcctcctgcccctcaccaggccctgttagcatcacctcgggcacctggccacagcaggggccagtcagggcaccccgggatagcacgcccaggccctgtgcaaggcctctggcacttaggagaggcttttgcccctttgtcctctgagcagaagggttggcaaagagggaaggggacaggccagttctgcacctggcctttctccagaatgaaggcctccacctcccgtcccaccccacagaaagaaaagtaaactgttttcgcggctgcgcagaaagaagaacatggtatgtgcagtgagtgctgcggaggggcgcagaggcccgcgccctggctggccctgtgcatgcgccttgcgccctgctcccaggtgccactaacccgtaatctgctgctctgtgtgcagtgctgcccggcagggctgtcgtgtgcgtgttgggtgggaaggcggaggcggcgcggggcgggctggcctctgagcatctggctgcatttagcacg

SEQ ID NO: 542 - DNA, 504 bp, Artificial Sequence
  Synthetic
gagcctcctgcccctcaccaggccctgttagcatcacctcgggcacctggccacagcaggggccagtcagggcaccccgggatagcacgcccaggccctgtgcaaggcctctggcacttaggagaggcttttgcccctttgtcctctgagcagaagggttggcaaagagggaaggggacaggccagttctgcacctggcctttctccagaatgaaggcctccacctcccgtcccaccccacagaaagaaaagtaaactgttttcgcggctgcgcagaaagaagaacatggtatgtgcagtgagtgctgcggaggggcgcagaggcccgcgccctggctggccctgtgcatgcgccttgcgccctgctcccaggtgccactaacccgtaatctgctgctctgtgtgcatgtgctgcccggcagggctgtcgtgtgcgtgttgggtgggaaggcggaggcggcgcggggcgggctggcctctgagcatctggctgcatttagcacg

SEQ ID NO: 543 - DNA, 502 bp, Artificial Sequence
  Synthetic
gagcctcctgcccctcaccaggccctgttagcatcacctcgggcacctggccacagcaggggccagtcagggcaccccgggatagcacgcccaggccctgtgcaaggcctctggcacttaggagaggcttttgcccctttgtcctctgagcagaagggttggcaaagagggaaggggacaggccagttctgcacctggcctttctccagaatgaaggcctccacctcccgtcccaccccacagaaagaaaagtaaactgttttcgcggctgcgcagaaagaagaacatggtatgtgcagtgagtgctgcggaggggcgcagaggcccgcgccctggctggccctgtgcatgcgccttgcgccctgctcccaggtgctcactaacccgtaatctggctctgtgtgcagtgctgcccggcagggctgtcgtgtgcgtgttgggtgggaaggcggaggcggcgcggggcgggctggcctctgagcatctggctgcatttagcacg

SEQ ID NO: 544 - DNA, 503 bp, Artificial Sequence
  Synthetic
gagcctcctgcccctcaccaggccctgttagcatcacctcgggcacctggccacagcaggggccagtcagggcaccccgggatagcacgcccaggccctgtgcaaggcctctggcacttaggagaggcttttgcccctttgtcctctgagcagaagggttggcaaagagggaaggggacaggccagttctgcacctggcctttctccagaatgaaggcctccacctcccgtcccaccccacagaaagaaaagtaaactgttttcgcggctgcgcagaaagaagaacatggtatgtgcagtgagtgctgcggaggggcgcagaggcccgcgccctggctggccctgtgcatgcgccttgcgccctgctcccaggtgctcactaacccgtaatctggctctgtgtgcatgtgctgcccggcagggctgtcgtgtgcgtgttgggtgggaaggcggaggcggcgcggggcgggctggcctctgagcatctggctgcatttagcacg

SEQ ID NO: 545 - DNA, 504 bp, Artificial Sequence
  Synthetic
gagcctcctgcccctcaccaggccctgttagcatcacctcgggcacctggccacagcaggggccagtcagggcaccccgggatagcacgcccaggccctgtgcaaggcctctggcacttaggagaggcttttgcccctttgtcctctgagcagaagggttggcaaagagggaaggggacaggccagttctgcacctggcctttctccagaatgaaggcctccacctcccgtcccaccccacagaaagaaaagtaaactgttttcgcggctgcgcagaaagaagaacatggtatgtgcagtgagtgctgcggaggggcgcagaggcccgcgccctggctggccctgtgcatgcgccttgcgccctgctcccaggtgctcactaacccgtaatctgctgctctgtgtgcagtgctgcccggcagggctgtcgtgtgcgtgttgggtgggaaggcggaggcggcgcggggcgggctggcctctgagcatctggctgcatttagcacg

SEQ ID NO: 546 - DNA, 505 bp, Artificial Sequence
  Synthetic
gagcctcctgcccctcaccaggccctgttagcatcacctcgggcacctggccacagcaggggccagtcagggcaccccgggatagcacgcccaggccctgtgcaaggcctctggcacttaggagaggcttttgcccctttgtcctctgagcagaagggttggcaaagagggaaggggacaggccagttctgcacctggcctttctccagaatgaaggcctccacctcccgtcccaccccacagaaagaaaagtaaactgttttcgcggctgcgcagaaagaagaacatggtatgtgcagtgagtgctgcggaggggcgcagaggcccgcgccctggctggccctgtgcatgcgccttgcgccctgctcccaggtgctcactaacccgtaatctgctgctctgtgtgcatgtgctgcccggcagggctgtcgtgtgcgtgttgggtgggaaggcggaggcggcgcggggcgggctggcctctgagcatctggctgcatttagcacg

SEQ ID NO: 547 - DNA, 502 bp, Artificial Sequence
  Synthetic
gagcctcctgcccctcaccaggccctgttagcatcacctcgggcacctggccacagcaggggccagtcagggcaccccgggatagcacgcccaggccctgtgcaaggcctctggcacttaggagaggcttttgcccctttgtcctctgagcagaagggttggcaaagagggaaggggacaggccagttctgcacctggcctttctccagaatgaaggcctccacctcccgtcccaccccacagaaagaaaagtaaactgttttcgcggctgcgcagaaagaagaacatggtatgtgcagtgagtgctgcggaggggcgcagaggcccgcgccctggctggccctgtgcatgctgccttgcgccctgctcccaggtgccactaacccgtaatctggctctgtgtgcagtgctgcccggcagggctgtcgtgtgcgtgttgggtgggaaggcggaggcggcgcggggcgggctggcctctgagcatctggctgcatttagcacg

SEQ ID NO: 548 - DNA, 503 bp, Artificial Sequence
  Synthetic
gagcctcctgcccctcaccaggccctgttagcatcacctcgggcacctggccacagcaggggccagtcagggcaccccgggatagcacgcccaggccctgtgcaaggcctctggcacttaggagaggcttttgcccctttgtcctctgagcagaagggttggcaaagagggaaggggacaggccagttctgcacctggcctttctccagaatgaaggcctccacctcccgtcccaccccacagaaagaaaagtaaactgttttcgcggctgcgcagaaagaagaacatggtatgtgcagtgagtgctgcggaggggcgcagaggcccgcgccctggctggccctgtgcatgctgccttgcgccctgctcccaggtgccactaacccgtaatctggctctgtgtgcatgtgctgcccggcagggctgtcgtgtgcgtgttgggtgggaaggcggaggcggcgcggggcgggctggcctctgagcatctggctgcatttagcacg

SEQ ID NO: 549 - DNA, 504 bp, Artificial Sequence
  Synthetic
gagcctcctgcccctcaccaggccctgttagcatcacctcgggcacctggccacagcaggggccagtcagggcaccccgggatagcacgcccaggccctgtgcaaggcctctggcacttaggagaggcttttgcccctttgtcctctgagcagaagggttggcaaagagggaaggggacaggccagttctgcacctggcctttctccagaatgaaggcctccacctcccgtcccaccccacagaaagaaaagtaaactgttttcgcggctgcgcagaaagaagaacatggtatgtgcagtgagtgctgcggaggggcgcagaggcccgcgccctggctggccctgtgcatgctgccttgcgccctgctcccaggtgccactaacccgtaatctgctgctctgtgtgcagtgctgcccggcagggctgtcgtgtgcgtgttgggtgggaaggcggaggcggcgcggggcgggctggcctctgagcatctggctgcatttagcacg

SEQ ID NO: 550 - DNA, 505 bp, Artificial Sequence
  Synthetic
gagcctcctgcccctcaccaggccctgttagcatcacctcgggcacctggccacagcaggggccagtcagggcaccccgggatagcacgcccaggccctgtgcaaggcctctggcacttaggagaggcttttgcccctttgtcctctgagcagaagggttggcaaagagggaaggggacaggccagttctgcacctggcctttctccagaatgaaggcctccacctcccgtcccaccccacagaaagaaaagtaaactgttttcgcggctgcgcagaaagaagaacatggtatgtgcagtgagtgctgcggaggggcgcagaggcccgcgccctggctggccctgtgcatgctgccttgcgccctgctcccaggtgccactaacccgtaatctgctgctctgtgtgcatgtgctgcccggcagggctgtcgtgtgcgtgttgggtgggaaggcggaggcggcgcggggcgggctggcctctgagcatctggctgcatttagcacg

SEQ ID NO: 551 - DNA, 503 bp, Artificial Sequence
  Synthetic
gagcctcctgcccctcaccaggccctgttagcatcacctcgggcacctggccacagcaggggccagtcagggcaccccgggatagcacgcccaggccctgtgcaaggcctctggcacttaggagaggcttttgcccctttgtcctctgagcagaagggttggcaaagagggaaggggacaggccagttctgcacctggcctttctccagaatgaaggcctccacctcccgtcccaccccacagaaagaaaagtaaactgttttcgcggctgcgcagaaagaagaacatggtatgtgcagtgagtgctgcggaggggcgcagaggcccgcgccctggctggccctgtgcatgctgccttgcgccctgctcccaggtgctcactaacccgtaatctggctctgtgtgcagtgctgcccggcagggctgtcgtgtgcgtgttgggtgggaaggcggaggcggcgcggggcgggctggcctctgagcatctggctgcatttagcacg

SEQ ID NO: 552 - DNA, 504 bp, Artificial Sequence
  Synthetic
gagcctcctgcccctcaccaggccctgttagcatcacctcgggcacctggccacagcaggggccagtcagggcaccccgggatagcacgcccaggccctgtgcaaggcctctggcacttaggagaggcttttgcccctttgtcctctgagcagaagggttggcaaagagggaaggggacaggccagttctgcacctggcctttctccagaatgaaggcctccacctcccgtcccaccccacagaaagaaaagtaaactgttttcgcggctgcgcagaaagaagaacatggtatgtgcagtgagtgctgcggaggggcgcagaggcccgcgccctggctggccctgtgcatgctgccttgcgccctgctcccaggtgctcactaacccgtaatctggctctgtgtgcatgtgctgcccggcagggctgtcgtgtgcgtgttgggtgggaaggcggaggcggcgcggggcgggctggcctctgagcatctggctgcatttagcacg

SEQ ID NO: 553 - DNA, 505 bp, Artificial Sequence
  Synthetic
gagcctcctgcccctcaccaggccctgttagcatcacctcgggcacctggccacagcaggggccagtcagggcaccccgggatagcacgcccaggccctgtgcaaggcctctggcacttaggagaggcttttgcccctttgtcctctgagcagaagggttggcaaagagggaaggggacaggccagttctgcacctggcctttctccagaatgaaggcctccacctcccgtcccaccccacagaaagaaaagtaaactgttttcgcggctgcgcagaaagaagaacatggtatgtgcagtgagtgctgcggaggggcgcagaggcccgcgccctggctggccctgtgcatgctgccttgcgccctgctcccaggtgctcactaacccgtaatctgctgctctgtgtgcagtgctgcccggcagggctgtcgtgtgcgtgttgggtgggaaggcggaggcggcgcggggcgggctggcctctgagcatctggctgcatttagcacg

SEQ ID NO: 554 - DNA, 506 bp, Artificial Sequence
  Synthetic
gagcctcctgcccctcaccaggccctgttagcatcacctcgggcacctggccacagcaggggccagtcagggcaccccgggatagcacgcccaggccctgtgcaaggcctctggcacttaggagaggcttttgcccctttgtcctctgagcagaagggttggcaaagagggaaggggacaggccagttctgcacctggcctttctccagaatgaaggcctccacctcccgtcccaccccacagaaagaaaagtaaactgttttcgcggctgcgcagaaagaagaacatggtatgtgcagtgagtgctgcggaggggcgcagaggcccgcgccctggctggccctgtgcatgctgccttgcgccctgctcccaggtgctcactaacccgtaatctgctgctctgtgtgcatgtgctgcccggcagggctgtcgtgtgcgtgttgggtgggaaggcggaggcggcgcggggcgggctggcctctgagcatctggctgcatttagcacg

SEQ ID NO: 555 - DNA, 501 bp, Artificial Sequence
  Synthetic
gagcctcctgcccctcaccaggccctgttagcatcacctcgggcacctggccacagcaggggccagtcagggcaccccgggatagcacgcccaggccctgtgcaaggcctctggcacttaggagaggcttttgcccctttgtcctctgagcagaagggttggcaaagagggaaggggacaggccagttctgcacctggcctttctccagaatgaaggcctccacctcccgtcccaccccacagaaagaaaagtaaactgttttcgcggctgcgcagaaagaagaacatggtacgagcagtgagtgctgcggaggggcgcagaggcccgcgccctggctggccctgtgcatgcgccttgcgccctgctcccaggtgccactaacccgtaatctggctctgtgtgcagtgctgcccggcagggctgtcgtgtgcgtgttgggtgggaaggcggaggcggcgcggggcgggctggcctctgagcatctggctgcatttagcacg

SEQ ID NO: 556 - DNA, 502 bp, Artificial Sequence
  Synthetic
gagcctcctgcccctcaccaggccctgttagcatcacctcgggcacctggccacagcaggggccagtcagggcaccccgggatagcacgcccaggccctgtgcaaggcctctggcacttaggagaggcttttgcccctttgtcctctgagcagaagggttggcaaagagggaaggggacaggccagttctgcacctggcctttctccagaatgaaggcctccacctcccgtcccaccccacagaaagaaaagtaaactgttttcgcggctgcgcagaaagaagaacatggtacgagcagtgagtgctgcggaggggcgcagaggcccgcgccctggctggccctgtgcatgcgccttgcgccctgctcccaggtgccactaacccgtaatctggctctgtgtgcatgtgctgcccggcagggctgtcgtgtgcgtgttgggtgggaaggcggaggcggcgcggggcgggctggcctctgagcatctggctgcatttagcacg

SEQ ID NO: 557 - DNA, 503 bp, Artificial Sequence
  Synthetic
gagcctcctgcccctcaccaggccctgttagcatcacctcgggcacctggccacagcaggggccagtcagggcaccccgggatagcacgcccaggccctgtgcaaggcctctggcacttaggagaggcttttgcccctttgtcctctgagcagaagggttggcaaagagggaaggggacaggccagttctgcacctggcctttctccagaatgaaggcctccacctcccgtcccaccccacagaaagaaaagtaaactgttttcgcggctgcgcagaaagaagaacatggtacgagcagtgagtgctgcggaggggcgcagaggcccgcgccctggctggccctgtgcatgcgccttgcgccctgctcccaggtgccactaacccgtaatctgctgctctgtgtgcagtgctgcccggcagggctgtcgtgtgcgtgttgggtgggaaggcggaggcggcgcggggcgggctggcctctgagcatctggctgcatttagcacg

SEQ ID NO: 558 - DNA, 504 bp, Artificial Sequence
  Synthetic
gagcctcctgcccctcaccaggccctgttagcatcacctcgggcacctggccacagcaggggccagtcagggcaccccgggatagcacgcccaggccctgtgcaaggcctctggcacttaggagaggcttttgcccctttgtcctctgagcagaagggttggcaaagagggaaggggacaggccagttctgcacctggcctttctccagaatgaaggcctccacctcccgtcccaccccacagaaagaaaagtaaactgttttcgcggctgcgcagaaagaagaacatggtacgagcagtgagtgctgcggaggggcgcagaggcccgcgccctggctggccctgtgcatgcgccttgcgccctgctcccaggtgccactaacccgtaatctgctgctctgtgtgcatgtgctgcccggcagggctgtcgtgtgcgtgttgggtgggaaggcggaggcggcgcggggcgggctggcctctgagcatctggctgcatttagcacg

SEQ ID NO: 559 - DNA, 502 bp, Artificial Sequence
  Synthetic
gagcctcctgcccctcaccaggccctgttagcatcacctcgggcacctggccacagcaggggccagtcagggcaccccgggatagcacgcccaggccctgtgcaaggcctctggcacttaggagaggcttttgcccctttgtcctctgagcagaagggttggcaaagagggaaggggacaggccagttctgcacctggcctttctccagaatgaaggcctccacctcccgtcccaccccacagaaagaaaagtaaactgttttcgcggctgcgcagaaagaagaacatggtacgagcagtgagtgctgcggaggggcgcagaggcccgcgccctggctggccctgtgcatgcgccttgcgccctgctcccaggtgctcactaacccgtaatctggctctgtgtgcagtgctgcccggcagggctgtcgtgtgcgtgttgggtgggaaggcggaggcggcgcggggcgggctggcctctgagcatctggctgcatttagcacg

SEQ ID NO: 560 - DNA, 503 bp, Artificial Sequence
  Synthetic
gagcctcctgcccctcaccaggccctgttagcatcacctcgggcacctggccacagcaggggccagtcagggcaccccgggatagcacgcccaggccctgtgcaaggcctctggcacttaggagaggcttttgcccctttgtcctctgagcagaagggttggcaaagagggaaggggacaggccagttctgcacctggcctttctccagaatgaaggcctccacctcccgtcccaccccacagaaagaaaagtaaactgttttcgcggctgcgcagaaagaagaacatggtacgagcagtgagtgctgcggaggggcgcagaggcccgcgccctggctggccctgtgcatgcgccttgcgccctgctcccaggtgctcactaacccgtaatctggctctgtgtgcatgtgctgcccggcagggctgtcgtgtgcgtgttgggtgggaaggcggaggcggcgcggggcgggctggcctctgagcatctggctgcatttagcacg

SEQ ID NO: 561 - DNA, 504 bp, Artificial Sequence
  Synthetic
gagcctcctgcccctcaccaggccctgttagcatcacctcgggcacctggccacagcaggggccagtcagggcaccccgggatagcacgcccaggccctgtgcaaggcctctggcacttaggagaggcttttgcccctttgtcctctgagcagaagggttggcaaagagggaaggggacaggccagttctgcacctggcctttctccagaatgaaggcctccacctcccgtcccaccccacagaaagaaaagtaaactgttttcgcggctgcgcagaaagaagaacatggtacgagcagtgagtgctgcggaggggcgcagaggcccgcgccctggctggccctgtgcatgcgccttgcgccctgctcccaggtgctcactaacccgtaatctgctgctctgtgtgcagtgctgcccggcagggctgtcgtgtgcgtgttgggtgggaaggcggaggcggcgcggggcgggctggcctctgagcatctggctgcatttagcacg

SEQ ID NO: 562 - DNA, 505 bp, Artificial Sequence
  Synthetic
gagcctcctgcccctcaccaggccctgttagcatcacctcgggcacctggccacagcaggggccagtcagggcaccccgggatagcacgcccaggccctgtgcaaggcctctggcacttaggagaggcttttgcccctttgtcctctgagcagaagggttggcaaagagggaaggggacaggccagttctgcacctggcctttctccagaatgaaggcctccacctcccgtcccaccccacagaaagaaaagtaaactgttttcgcggctgcgcagaaagaagaacatggtacgagcagtgagtgctgcggaggggcgcagaggcccgcgccctggctggccctgtgcatgcgccttgcgccctgctcccaggtgctcactaacccgtaatctgctgctctgtgtgcatgtgctgcccggcagggctgtcgtgtgcgtgttgggtgggaaggcggaggcggcgcggggcgggctggcctctgagcatctggctgcatttagcacg

SEQ ID NO: 563 - DNA, 502 bp, Artificial Sequence
  Synthetic
gagcctcctgcccctcaccaggccctgttagcatcacctcgggcacctggccacagcaggggccagtcagggcaccccgggatagcacgcccaggccctgtgcaaggcctctggcacttaggagaggcttttgcccctttgtcctctgagcagaagggttggcaaagagggaaggggacaggccagttctgcacctggcctttctccagaatgaaggcctccacctcccgtcccaccccacagaaagaaaagtaaactgttttcgcggctgcgcagaaagaagaacatggtacgagcagtgagtgctgcggaggggcgcagaggcccgcgccctggctggccctgtgcatgctgccttgcgccctgctcccaggtgccactaacccgtaatctggctctgtgtgcagtgctgcccggcagggctgtcgtgtgcgtgttgggtgggaaggcggaggcggcgcggggcgggctggcctctgagcatctggctgcatttagcacg

SEQ ID NO: 564 - DNA, 503 bp, Artificial Sequence
  Synthetic
gagcctcctgcccctcaccaggccctgttagcatcacctcgggcacctggccacagcaggggccagtcagggcaccccgggatagcacgcccaggccctgtgcaaggcctctggcacttaggagaggcttttgcccctttgtcctctgagcagaagggttggcaaagagggaaggggacaggccagttctgcacctggcctttctccagaatgaaggcctccacctcccgtcccaccccacagaaagaaaagtaaactgttttcgcggctgcgcagaaagaagaacatggtacgagcagtgagtgctgcggaggggcgcagaggcccgcgccctggctggccctgtgcatgctgccttgcgccctgctcccaggtgccactaacccgtaatctggctctgtgtgcatgtgctgcccggcagggctgtcgtgtgcgtgttgggtgggaaggcggaggcggcgcggggcgggctggcctctgagcatctggctgcatttagcacg

SEQ ID NO: 565 - DNA, 504 bp, Artificial Sequence
  Synthetic
gagcctcctgcccctcaccaggccctgttagcatcacctcgggcacctggccacagcaggggccagtcagggcaccccgggatagcacgcccaggccctgtgcaaggcctctggcacttaggagaggcttttgcccctttgtcctctgagcagaagggttggcaaagagggaaggggacaggccagttctgcacctggcctttctccagaatgaaggcctccacctcccgtcccaccccacagaaagaaaagtaaactgttttcgcggctgcgcagaaagaagaacatggtacgagcagtgagtgctgcggaggggcgcagaggcccgcgccctggctggccctgtgcatgctgccttgcgccctgctcccaggtgccactaacccgtaatctgctgctctgtgtgcagtgctgcccggcagggctgtcgtgtgcgtgttgggtgggaaggcggaggcggcgcggggcgggctggcctctgagcatctggctgcatttagcacg

SEQ ID NO: 566 - DNA, 505 bp, Artificial Sequence
  Synthetic
gagcctcctgcccctcaccaggccctgttagcatcacctcgggcacctggccacagcaggggccagtcagggcaccccgggatagcacgcccaggccctgtgcaaggcctctggcacttaggagaggcttttgcccctttgtcctctgagcagaagggttggcaaagagggaaggggacaggccagttctgcacctggcctttctccagaatgaaggcctccacctcccgtcccaccccacagaaagaaaagtaaactgttttcgcggctgcgcagaaagaagaacatggtacgagcagtgagtgctgcggaggggcgcagaggcccgcgccctggctggccctgtgcatgctgccttgcgccctgctcccaggtgccactaacccgtaatctgctgctctgtgtgcatgtgctgcccggcagggctgtcgtgtgcgtgttgggtgggaaggcggaggcggcgcggggcgggctggcctctgagcatctggctgcatttagcacg

SEQ ID NO: 567 - DNA, 503 bp, Artificial Sequence
  Synthetic
gagcctcctgcccctcaccaggccctgttagcatcacctcgggcacctggccacagcaggggccagtcagggcaccccgggatagcacgcccaggccctgtgcaaggcctctggcacttaggagaggcttttgcccctttgtcctctgagcagaagggttggcaaagagggaaggggacaggccagttctgcacctggcctttctccagaatgaaggcctccacctcccgtcccaccccacagaaagaaaagtaaactgttttcgcggctgcgcagaaagaagaacatggtacgagcagtgagtgctgcggaggggcgcagaggcccgcgccctggctggccctgtgcatgctgccttgcgccctgctcccaggtgctcactaacccgtaatctggctctgtgtgcagtgctgcccggcagggctgtcgtgtgcgtgttgggtgggaaggcggaggcggcgcggggcgggctggcctctgagcatctggctgcatttagcacg

SEQ ID NO: 568 - DNA, 504 bp, Artificial Sequence
  Synthetic
gagcctcctgcccctcaccaggccctgttagcatcacctcgggcacctggccacagcaggggccagtcagggcaccccgggatagcacgcccaggccctgtgcaaggcctctggcacttaggagaggcttttgcccctttgtcctctgagcagaagggttggcaaagagggaaggggacaggccagttctgcacctggcctttctccagaatgaaggcctccacctcccgtcccaccccacagaaagaaaagtaaactgttttcgcggctgcgcagaaagaagaacatggtacgagcagtgagtgctgcggaggggcgcagaggcccgcgccctggctggccctgtgcatgctgccttgcgccctgctcccaggtgctcactaacccgtaatctggctctgtgtgcatgtgctgcccggcagggctgtcgtgtgcgtgttgggtgggaaggcggaggcggcgcggggcgggctggcctctgagcatctggctgcatttagcacg

SEQ ID NO: 569 - DNA, 505 bp, Artificial Sequence
  Synthetic
gagcctcctgcccctcaccaggccctgttagcatcacctcgggcacctggccacagcaggggccagtcagggcaccccgggatagcacgcccaggccctgtgcaaggcctctggcacttaggagaggcttttgcccctttgtcctctgagcagaagggttggcaaagagggaaggggacaggccagttctgcacctggcctttctccagaatgaaggcctccacctcccgtcccaccccacagaaagaaaagtaaactgttttcgcggctgcgcagaaagaagaacatggtacgagcagtgagtgctgcggaggggcgcagaggcccgcgccctggctggccctgtgcatgctgccttgcgccctgctcccaggtgctcactaacccgtaatctgctgctctgtgtgcagtgctgcccggcagggctgtcgtgtgcgtgttgggtgggaaggcggaggcggcgcggggcgggctggcctctgagcatctggctgcatttagcacg

SEQ ID NO: 570 - DNA, 506 bp, Artificial Sequence
  Synthetic
gagcctcctgcccctcaccaggccctgttagcatcacctcgggcacctggccacagcaggggccagtcagggcaccccgggatagcacgcccaggccctgtgcaaggcctctggcacttaggagaggcttttgcccctttgtcctctgagcagaagggttggcaaagagggaaggggacaggccagttctgcacctggcctttctccagaatgaaggcctccacctcccgtcccaccccacagaaagaaaagtaaactgttttcgcggctgcgcagaaagaagaacatggtacgagcagtgagtgctgcggaggggcgcagaggcccgcgccctggctggccctgtgcatgctgccttgcgccctgctcccaggtgctcactaacccgtaatctgctgctctgtgtgcatgtgctgcccggcagggctgtcgtgtgcgtgttgggtgggaaggcggaggcggcgcggggcgggctggcctctgagcatctggctgcatttagcacg

SEQ ID NO: 571 - DNA, 501 bp, Artificial Sequence
  Synthetic
gagcctcctgcccctcaccaggccctgttagcatcacctcgggcacctggccacagcaggggccagtcagggcaccccgggatagcacgcccaggccctgtgcaaggcctctggcacttaggagaggcttttgcccctttgtcctctgagcagaagggttggcaaagagggaaggggacaggccagttctgcacctggcctttctccagaatgaaggcctccacctcccgtcccaccccacagaaagaaaagtaaactgttttcgcggctgcgcagaaagaagaacatggttcgtgcagtgagtgctgcggaggggcgcagaggcccgcgccctggctggccctgtgcatgcgccttgcgccctgctcccaggtgccactaacccgtaatctggctctgtgtgcagtgctgcccggcagggctgtcgtgtgcgtgttgggtgggaaggcggaggcggcgcggggcgggctggcctctgagcatctggctgcatttagcacg

SEQ ID NO: 572 - DNA, 502 bp, Artificial Sequence
  Synthetic
gagcctcctgcccctcaccaggccctgttagcatcacctcgggcacctggccacagcaggggccagtcagggcaccccgggatagcacgcccaggccctgtgcaaggcctctggcacttaggagaggcttttgcccctttgtcctctgagcagaagggttggcaaagagggaaggggacaggccagttctgcacctggcctttctccagaatgaaggcctccacctcccgtcccaccccacagaaagaaaagtaaactgttttcgcggctgcgcagaaagaagaacatggttcgtgcagtgagtgctgcggaggggcgcagaggcccgcgccctggctggccctgtgcatgcgccttgcgccctgctcccaggtgccactaacccgtaatctggctctgtgtgcatgtgctgcccggcagggctgtcgtgtgcgtgttgggtgggaaggcggaggcggcgcggggcgggctggcctctgagcatctggctgcatttagcacg

SEQ ID NO: 573 - DNA, 503 bp, Artificial Sequence
  Synthetic
gagcctcctgcccctcaccaggccctgttagcatcacctcgggcacctggccacagcaggggccagtcagggcaccccgggatagcacgcccaggccctgtgcaaggcctctggcacttaggagaggcttttgcccctttgtcctctgagcagaagggttggcaaagagggaaggggacaggccagttctgcacctggcctttctccagaatgaaggcctccacctcccgtcccaccccacagaaagaaaagtaaactgttttcgcggctgcgcagaaagaagaacatggttcgtgcagtgagtgctgcggaggggcgcagaggcccgcgccctggctggccctgtgcatgcgccttgcgccctgctcccaggtgccactaacccgtaatctgctgctctgtgtgcagtgctgcccggcagggctgtcgtgtgcgtgttgggtgggaaggcggaggcggcgcggggcgggctggcctctgagcatctggctgcatttagcacg

SEQ ID NO: 574 - DNA, 504 bp, Artificial Sequence
  Synthetic
gagcctcctgcccctcaccaggccctgttagcatcacctcgggcacctggccacagcaggggccagtcagggcaccccgggatagcacgcccaggccctgtgcaaggcctctggcacttaggagaggcttttgcccctttgtcctctgagcagaagggttggcaaagagggaaggggacaggccagttctgcacctggcctttctccagaatgaaggcctccacctcccgtcccaccccacagaaagaaaagtaaactgttttcgcggctgcgcagaaagaagaacatggttcgtgcagtgagtgctgcggaggggcgcagaggcccgcgccctggctggccctgtgcatgcgccttgcgccctgctcccaggtgccactaacccgtaatctgctgctctgtgtgcatgtgctgcccggcagggctgtcgtgtgcgtgttgggtgggaaggcggaggcggcgcggggcgggctggcctctgagcatctggctgcatttagcacg

SEQ ID NO: 575 - DNA, 502 bp, Artificial Sequence
  Synthetic
gagcctcctgcccctcaccaggccctgttagcatcacctcgggcacctggccacagcaggggccagtcagggcaccccgggatagcacgcccaggccctgtgcaaggcctctggcacttaggagaggcttttgcccctttgtcctctgagcagaagggttggcaaagagggaaggggacaggccagttctgcacctggcctttctccagaatgaaggcctccacctcccgtcccaccccacagaaagaaaagtaaactgttttcgcggctgcgcagaaagaagaacatggttcgtgcagtgagtgctgcggaggggcgcagaggcccgcgccctggctggccctgtgcatgcgccttgcgccctgctcccaggtgctcactaacccgtaatctggctctgtgtgcagtgctgcccggcagggctgtcgtgtgcgtgttgggtgggaaggcggaggcggcgcggggcgggctggcctctgagcatctggctgcatttagcacg

SEQ ID NO: 576 - DNA, 503 bp, Artificial Sequence
  Synthetic
gagcctcctgcccctcaccaggccctgttagcatcacctcgggcacctggccacagcaggggccagtcagggcaccccgggatagcacgcccaggccctgtgcaaggcctctggcacttaggagaggcttttgcccctttgtcctctgagcagaagggttggcaaagagggaaggggacaggccagttctgcacctggcctttctccagaatgaaggcctccacctcccgtcccaccccacagaaagaaaagtaaactgttttcgcggctgcgcagaaagaagaacatggttcgtgcagtgagtgctgcggaggggcgcagaggcccgcgccctggctggccctgtgcatgcgccttgcgccctgctcccaggtgctcactaacccgtaatctggctctgtgtgcatgtgctgcccggcagggctgtcgtgtgcgtgttgggtgggaaggcggaggcggcgcggggcgggctggcctctgagcatctggctgcatttagcacg

SEQ ID NO: 577 - DNA, 504 bp, Artificial Sequence
  Synthetic
gagcctcctgcccctcaccaggccctgttagcatcacctcgggcacctggccacagcaggggccagtcagggcaccccgggatagcacgcccaggccctgtgcaaggcctctggcacttaggagaggcttttgcccctttgtcctctgagcagaagggttggcaaagagggaaggggacaggccagttctgcacctggcctttctccagaatgaaggcctccacctcccgtcccaccccacagaaagaaaagtaaactgttttcgcggctgcgcagaaagaagaacatggttcgtgcagtgagtgctgcggaggggcgcagaggcccgcgccctggctggccctgtgcatgcgccttgcgccctgctcccaggtgctcactaacccgtaatctgctgctctgtgtgcagtgctgcccggcagggctgtcgtgtgcgtgttgggtgggaaggcggaggcggcgcggggcgggctggcctctgagcatctggctgcatttagcacg

SEQ ID NO: 578 - DNA, 505 bp, Artificial Sequence
  Synthetic
gagcctcctgcccctcaccaggccctgttagcatcacctcgggcacctggccacagcaggggccagtcagggcaccccgggatagcacgcccaggccctgtgcaaggcctctggcacttaggagaggcttttgcccctttgtcctctgagcagaagggttggcaaagagggaaggggacaggccagttctgcacctggcctttctccagaatgaaggcctccacctcccgtcccaccccacagaaagaaaagtaaactgttttcgcggctgcgcagaaagaagaacatggttcgtgcagtgagtgctgcggaggggcgcagaggcccgcgccctggctggccctgtgcatgcgccttgcgccctgctcccaggtgctcactaacccgtaatctgctgctctgtgtgcatgtgctgcccggcagggctgtcgtgtgcgtgttgggtgggaaggcggaggcggcgcggggcgggctggcctctgagcatctggctgcatttagcacg

SEQ ID NO: 579 - DNA, 502 bp, Artificial Sequence
  Synthetic
gagcctcctgcccctcaccaggccctgttagcatcacctcgggcacctggccacagcaggggccagtcagggcaccccgggatagcacgcccaggccctgtgcaaggcctctggcacttaggagaggcttttgcccctttgtcctctgagcagaagggttggcaaagagggaaggggacaggccagttctgcacctggcctttctccagaatgaaggcctccacctcccgtcccaccccacagaaagaaaagtaaactgttttcgcggctgcgcagaaagaagaacatggttcgtgcagtgagtgctgcggaggggcgcagaggcccgcgccctggctggccctgtgcatgctgccttgcgccctgctcccaggtgccactaacccgtaatctggctctgtgtgcagtgctgcccggcagggctgtcgtgtgcgtgttgggtgggaaggcggaggcggcgcggggcgggctggcctctgagcatctggctgcatttagcacg

SEQ ID NO: 580 - DNA, 503 bp, Artificial Sequence
  Synthetic
gagcctcctgcccctcaccaggccctgttagcatcacctcgggcacctggccacagcaggggccagtcagggcaccccgggatagcacgcccaggccctgtgcaaggcctctggcacttaggagaggcttttgcccctttgtcctctgagcagaagggttggcaaagagggaaggggacaggccagttctgcacctggcctttctccagaatgaaggcctccacctcccgtcccaccccacagaaagaaaagtaaactgttttcgcggctgcgcagaaagaagaacatggttcgtgcagtgagtgctgcggaggggcgcagaggcccgcgccctggctggccctgtgcatgctgccttgcgccctgctcccaggtgccactaacccgtaatctggctctgtgtgcatgtgctgcccggcagggctgtcgtgtgcgtgttgggtgggaaggcggaggcggcgcggggcgggctggcctctgagcatctggctgcatttagcacg

SEQ ID NO: 581 - DNA, 504 bp, Artificial Sequence
  Synthetic
gagcctcctgcccctcaccaggccctgttagcatcacctcgggcacctggccacagcaggggccagtcagggcaccccgggatagcacgcccaggccctgtgcaaggcctctggcacttaggagaggcttttgcccctttgtcctctgagcagaagggttggcaaagagggaaggggacaggccagttctgcacctggcctttctccagaatgaaggcctccacctcccgtcccaccccacagaaagaaaagtaaactgttttcgcggctgcgcagaaagaagaacatggttcgtgcagtgagtgctgcggaggggcgcagaggcccgcgccctggctggccctgtgcatgctgccttgcgccctgctcccaggtgccactaacccgtaatctgctgctctgtgtgcagtgctgcccggcagggctgtcgtgtgcgtgttgggtgggaaggcggaggcggcgcggggcgggctggcctctgagcatctggctgcatttagcacg

SEQ ID NO: 582 - DNA, 505 bp, Artificial Sequence
  Synthetic
gagcctcctgcccctcaccaggccctgttagcatcacctcgggcacctggccacagcaggggccagtcagggcaccccgggatagcacgcccaggccctgtgcaaggcctctggcacttaggagaggcttttgcccctttgtcctctgagcagaagggttggcaaagagggaaggggacaggccagttctgcacctggcctttctccagaatgaaggcctccacctcccgtcccaccccacagaaagaaaagtaaactgttttcgcggctgcgcagaaagaagaacatggttcgtgcagtgagtgctgcggaggggcgcagaggcccgcgccctggctggccctgtgcatgctgccttgcgccctgctcccaggtgccactaacccgtaatctgctgctctgtgtgcatgtgctgcccggcagggctgtcgtgtgcgtgttgggtgggaaggcggaggcggcgcggggcgggctggcctctgagcatctggctgcatttagcacg

SEQ ID NO: 583 - DNA, 503 bp, Artificial Sequence
  Synthetic
gagcctcctgcccctcaccaggccctgttagcatcacctcgggcacctggccacagcaggggccagtcagggcaccccgggatagcacgcccaggccctgtgcaaggcctctggcacttaggagaggcttttgcccctttgtcctctgagcagaagggttggcaaagagggaaggggacaggccagttctgcacctggcctttctccagaatgaaggcctccacctcccgtcccaccccacagaaagaaaagtaaactgttttcgcggctgcgcagaaagaagaacatggttcgtgcagtgagtgctgcggaggggcgcagaggcccgcgccctggctggccctgtgcatgctgccttgcgccctgctcccaggtgctcactaacccgtaatctggctctgtgtgcagtgctgcccggcagggctgtcgtgtgcgtgttgggtgggaaggcggaggcggcgcggggcgggctggcctctgagcatctggctgcatttagcacg

SEQ ID NO: 584 - DNA, 504 bp, Artificial Sequence
  Synthetic
gagcctcctgcccctcaccaggccctgttagcatcacctcgggcacctggccacagcaggggccagtcagggcaccccgggatagcacgcccaggccctgtgcaaggcctctggcacttaggagaggcttttgcccctttgtcctctgagcagaagggttggcaaagagggaaggggacaggccagttctgcacctggcctttctccagaatgaaggcctccacctcccgtcccaccccacagaaagaaaagtaaactgttttcgcggctgcgcagaaagaagaacatggttcgtgcagtgagtgctgcggaggggcgcagaggcccgcgccctggctggccctgtgcatgctgccttgcgccctgctcccaggtgctcactaacccgtaatctggctctgtgtgcatgtgctgcccggcagggctgtcgtgtgcgtgttgggtgggaaggcggaggcggcgcggggcgggctggcctctgagcatctggctgcatttagcacg

SEQ ID NO: 585 - DNA, 505 bp, Artificial Sequence
  Synthetic
gagcctcctgcccctcaccaggccctgttagcatcacctcgggcacctggccacagcaggggccagtcagggcaccccgggatagcacgcccaggccctgtgcaaggcctctggcacttaggagaggcttttgcccctttgtcctctgagcagaagggttggcaaagagggaaggggacaggccagttctgcacctggcctttctccagaatgaaggcctccacctcccgtcccaccccacagaaagaaaagtaaactgttttcgcggctgcgcagaaagaagaacatggttcgtgcagtgagtgctgcggaggggcgcagaggcccgcgccctggctggccctgtgcatgctgccttgcgccctgctcccaggtgctcactaacccgtaatctgctgctctgtgtgcagtgctgcccggcagggctgtcgtgtgcgtgttgggtgggaaggcggaggcggcgcggggcgggctggcctctgagcatctggctgcatttagcacg

SEQ ID NO: 586 - DNA, 506 bp, Artificial Sequence
  Synthetic
gagcctcctgcccctcaccaggccctgttagcatcacctcgggcacctggccacagcaggggccagtcagggcaccccgggatagcacgcccaggccctgtgcaaggcctctggcacttaggagaggcttttgcccctttgtcctctgagcagaagggttggcaaagagggaaggggacaggccagttctgcacctggcctttctccagaatgaaggcctccacctcccgtcccaccccacagaaagaaaagtaaactgttttcgcggctgcgcagaaagaagaacatggttcgtgcagtgagtgctgcggaggggcgcagaggcccgcgccctggctggccctgtgcatgctgccttgcgccctgctcccaggtgctcactaacccgtaatctgctgctctgtgtgcatgtgctgcccggcagggctgtcgtgtgcgtgttgggtgggaaggcggaggcggcgcggggcgggctggcctctgagcatctggctgcatttagcacg

SEQ ID NO: 587 - DNA, 501 bp, Artificial Sequence
  Synthetic
gagcctcctgcccctcaccaggccctgttagcatcacctcgggcacctggccacagcaggggccagtcagggcaccccgggatagcacgcccaggccctgtgcaaggcctctggcacttaggagaggcttttgcccctttgtcctctgagcagaagggttggcaaagagggaaggggacaggccagttctgcacctggcctttctccagaatgaaggcctccacctcccgcacgtccccacagaaagaaaagtaaactgttttcgcggctgcgcagaaagaagaacatggtacgtgcagtgagtgctgcggaggggcgcagaggcccgcgccctggctggccctgtgcatgcgccttgcgccctgctcccaggtgccactaacccgtaatctggctctgtgtgcagtgctgcccggcagggctgtcgtgtgcgtgttgggtgggaaggcggaggcggcgcggggcgggctggcctctgagcatctggctgcatttagcacg

SEQ ID NO: 588 - DNA, 502 bp, Artificial Sequence
  Synthetic
gagcctcctgcccctcaccaggccctgttagcatcacctcgggcacctggccacagcaggggccagtcagggcaccccgggatagcacgcccaggccctgtgcaaggcctctggcacttaggagaggcttttgcccctttgtcctctgagcagaagggttggcaaagagggaaggggacaggccagttctgcacctggcctttctccagaatgaaggcctccacctcccgcacgtccccacagaaagaaaagtaaactgttttcgcggctgcgcagaaagaagaacatggtacgtgcagtgagtgctgcggaggggcgcagaggcccgcgccctggctggccctgtgcatgcgccttgcgccctgctcccaggtgccactaacccgtaatctggctctgtgtgcatgtgctgcccggcagggctgtcgtgtgcgtgttgggtgggaaggcggaggcggcgcggggcgggctggcctctgagcatctggctgcatttagcacg

SEQ ID NO: 589 - DNA, 503 bp, Artificial Sequence
  Synthetic
gagcctcctgcccctcaccaggccctgttagcatcacctcgggcacctggccacagcaggggccagtcagggcaccccgggatagcacgcccaggccctgtgcaaggcctctggcacttaggagaggcttttgcccctttgtcctctgagcagaagggttggcaaagagggaaggggacaggccagttctgcacctggcctttctccagaatgaaggcctccacctcccgcacgtccccacagaaagaaaagtaaactgttttcgcggctgcgcagaaagaagaacatggtacgtgcagtgagtgctgcggaggggcgcagaggcccgcgccctggctggccctgtgcatgcgccttgcgccctgctcccaggtgccactaacccgtaatctgctgctctgtgtgcagtgctgcccggcagggctgtcgtgtgcgtgttgggtgggaaggcggaggcggcgcggggcgggctggcctctgagcatctggctgcatttagcacg

SEQ ID NO: 590 - DNA, 504 bp, Artificial Sequence
  Synthetic
gagcctcctgcccctcaccaggccctgttagcatcacctcgggcacctggccacagcaggggccagtcagggcaccccgggatagcacgcccaggccctgtgcaaggcctctggcacttaggagaggcttttgcccctttgtcctctgagcagaagggttggcaaagagggaaggggacaggccagttctgcacctggcctttctccagaatgaaggcctccacctcccgcacgtccccacagaaagaaaagtaaactgttttcgcggctgcgcagaaagaagaacatggtacgtgcagtgagtgctgcggaggggcgcagaggcccgcgccctggctggccctgtgcatgcgccttgcgccctgctcccaggtgccactaacccgtaatctgctgctctgtgtgcatgtgctgcccggcagggctgtcgtgtgcgtgttgggtgggaaggcggaggcggcgcggggcgggctggcctctgagcatctggctgcatttagcacg

SEQ ID NO: 591 - DNA, 502 bp, Artificial Sequence
  Synthetic
gagcctcctgcccctcaccaggccctgttagcatcacctcgggcacctggccacagcaggggccagtcagggcaccccgggatagcacgcccaggccctgtgcaaggcctctggcacttaggagaggcttttgcccctttgtcctctgagcagaagggttggcaaagagggaaggggacaggccagttctgcacctggcctttctccagaatgaaggcctccacctcccgcacgtccccacagaaagaaaagtaaactgttttcgcggctgcgcagaaagaagaacatggtacgtgcagtgagtgctgcggaggggcgcagaggcccgcgccctggctggccctgtgcatgcgccttgcgccctgctcccaggtgctcactaacccgtaatctggctctgtgtgcagtgctgcccggcagggctgtcgtgtgcgtgttgggtgggaaggcggaggcggcgcggggcgggctggcctctgagcatctggctgcatttagcacg

SEQ ID NO: 592 - DNA, 503 bp, Artificial Sequence
  Synthetic
gagcctcctgcccctcaccaggccctgttagcatcacctcgggcacctggccacagcaggggccagtcagggcaccccgggatagcacgcccaggccctgtgcaaggcctctggcacttaggagaggcttttgcccctttgtcctctgagcagaagggttggcaaagagggaaggggacaggccagttctgcacctggcctttctccagaatgaaggcctccacctcccgcacgtccccacagaaagaaaagtaaactgttttcgcggctgcgcagaaagaagaacatggtacgtgcagtgagtgctgcggaggggcgcagaggcccgcgccctggctggccctgtgcatgcgccttgcgccctgctcccaggtgctcactaacccgtaatctggctctgtgtgcatgtgctgcccggcagggctgtcgtgtgcgtgttgggtgggaaggcggaggcggcgcggggcgggctggcctctgagcatctggctgcatttagcacg

SEQ ID NO: 593 - DNA, 504 bp, Artificial Sequence
  Synthetic
gagcctcctgcccctcaccaggccctgttagcatcacctcgggcacctggccacagcaggggccagtcagggcaccccgggatagcacgcccaggccctgtgcaaggcctctggcacttaggagaggcttttgcccctttgtcctctgagcagaagggttggcaaagagggaaggggacaggccagttctgcacctggcctttctccagaatgaaggcctccacctcccgcacgtccccacagaaagaaaagtaaactgttttcgcggctgcgcagaaagaagaacatggtacgtgcagtgagtgctgcggaggggcgcagaggcccgcgccctggctggccctgtgcatgcgccttgcgccctgctcccaggtgctcactaacccgtaatctgctgctctgtgtgcagtgctgcccggcagggctgtcgtgtgcgtgttgggtgggaaggcggaggcggcgcggggcgggctggcctctgagcatctggctgcatttagcacg

SEQ ID NO: 594 - DNA, 505 bp, Artificial Sequence
  Synthetic
gagcctcctgcccctcaccaggccctgttagcatcacctcgggcacctggccacagcaggggccagtcagggcaccccgggatagcacgcccaggccctgtgcaaggcctctggcacttaggagaggcttttgcccctttgtcctctgagcagaagggttggcaaagagggaaggggacaggccagttctgcacctggcctttctccagaatgaaggcctccacctcccgcacgtccccacagaaagaaaagtaaactgttttcgcggctgcgcagaaagaagaacatggtacgtgcagtgagtgctgcggaggggcgcagaggcccgcgccctggctggccctgtgcatgcgccttgcgccctgctcccaggtgctcactaacccgtaatctgctgctctgtgtgcatgtgctgcccggcagggctgtcgtgtgcgtgttgggtgggaaggcggaggcggcgcggggcgggctggcctctgagcatctggctgcatttagcacg

SEQ ID NO: 595 - DNA, 502 bp, Artificial Sequence
  Synthetic
gagcctcctgcccctcaccaggccctgttagcatcacctcgggcacctggccacagcaggggccagtcagggcaccccgggatagcacgcccaggccctgtgcaaggcctctggcacttaggagaggcttttgcccctttgtcctctgagcagaagggttggcaaagagggaaggggacaggccagttctgcacctggcctttctccagaatgaaggcctccacctcccgcacgtccccacagaaagaaaagtaaactgttttcgcggctgcgcagaaagaagaacatggtacgtgcagtgagtgctgcggaggggcgcagaggcccgcgccctggctggccctgtgcatgctgccttgcgccctgctcccaggtgccactaacccgtaatctggctctgtgtgcagtgctgcccggcagggctgtcgtgtgcgtgttgggtgggaaggcggaggcggcgcggggcgggctggcctctgagcatctggctgcatttagcacg

SEQ ID NO: 596 - DNA, 503 bp, Artificial Sequence
  Synthetic
gagcctcctgcccctcaccaggccctgttagcatcacctcgggcacctggccacagcaggggccagtcagggcaccccgggatagcacgcccaggccctgtgcaaggcctctggcacttaggagaggcttttgcccctttgtcctctgagcagaagggttggcaaagagggaaggggacaggccagttctgcacctggcctttctccagaatgaaggcctccacctcccgcacgtccccacagaaagaaaagtaaactgttttcgcggctgcgcagaaagaagaacatggtacgtgcagtgagtgctgcggaggggcgcagaggcccgcgccctggctggccctgtgcatgctgccttgcgccctgctcccaggtgccactaacccgtaatctggctctgtgtgcatgtgctgcccggcagggctgtcgtgtgcgtgttgggtgggaaggcggaggcggcgcggggcgggctggcctctgagcatctggctgcatttagcacg

SEQ ID NO: 597 - DNA, 504 bp, Artificial Sequence
  Synthetic
gagcctcctgcccctcaccaggccctgttagcatcacctcgggcacctggccacagcaggggccagtcagggcaccccgggatagcacgcccaggccctgtgcaaggcctctggcacttaggagaggcttttgcccctttgtcctctgagcagaagggttggcaaagagggaaggggacaggccagttctgcacctggcctttctccagaatgaaggcctccacctcccgcacgtccccacagaaagaaaagtaaactgttttcgcggctgcgcagaaagaagaacatggtacgtgcagtgagtgctgcggaggggcgcagaggcccgcgccctggctggccctgtgcatgctgccttgcgccctgctcccaggtgccactaacccgtaatctgctgctctgtgtgcagtgctgcccggcagggctgtcgtgtgcgtgttgggtgggaaggcggaggcggcgcggggcgggctggcctctgagcatctggctgcatttagcacg

SEQ ID NO: 598 - DNA, 505 bp, Artificial Sequence
  Synthetic
gagcctcctgcccctcaccaggccctgttagcatcacctcgggcacctggccacagcaggggccagtcagggcaccccgggatagcacgcccaggccctgtgcaaggcctctggcacttaggagaggcttttgcccctttgtcctctgagcagaagggttggcaaagagggaaggggacaggccagttctgcacctggcctttctccagaatgaaggcctccacctcccgcacgtccccacagaaagaaaagtaaactgttttcgcggctgcgcagaaagaagaacatggtacgtgcagtgagtgctgcggaggggcgcagaggcccgcgccctggctggccctgtgcatgctgccttgcgccctgctcccaggtgccactaacccgtaatctgctgctctgtgtgcatgtgctgcccggcagggctgtcgtgtgcgtgttgggtgggaaggcggaggcggcgcggggcgggctggcctctgagcatctggctgcatttagcacg

SEQ ID NO: 599 - DNA, 503 bp, Artificial Sequence
  Synthetic
gagcctcctgcccctcaccaggccctgttagcatcacctcgggcacctggccacagcaggggccagtcagggcaccccgggatagcacgcccaggccctgtgcaaggcctctggcacttaggagaggcttttgcccctttgtcctctgagcagaagggttggcaaagagggaaggggacaggccagttctgcacctggcctttctccagaatgaaggcctccacctcccgcacgtccccacagaaagaaaagtaaactgttttcgcggctgcgcagaaagaagaacatggtacgtgcagtgagtgctgcggaggggcgcagaggcccgcgccctggctggccctgtgcatgctgccttgcgccctgctcccaggtgctcactaacccgtaatctggctctgtgtgcagtgctgcccggcagggctgtcgtgtgcgtgttgggtgggaaggcggaggcggcgcggggcgggctggcctctgagcatctggctgcatttagcacg

SEQ ID NO: 600 - DNA, 504 bp, Artificial Sequence
  Synthetic
gagcctcctgcccctcaccaggccctgttagcatcacctcgggcacctggccacagcaggggccagtcagggcaccccgggatagcacgcccaggccctgtgcaaggcctctggcacttaggagaggcttttgcccctttgtcctctgagcagaagggttggcaaagagggaaggggacaggccagttctgcacctggcctttctccagaatgaaggcctccacctcccgcacgtccccacagaaagaaaagtaaactgttttcgcggctgcgcagaaagaagaacatggtacgtgcagtgagtgctgcggaggggcgcagaggcccgcgccctggctggccctgtgcatgctgccttgcgccctgctcccaggtgctcactaacccgtaatctggctctgtgtgcatgtgctgcccggcagggctgtcgtgtgcgtgttgggtgggaaggcggaggcggcgcggggcgggctggcctctgagcatctggctgcatttagcacg

SEQ ID NO: 601 - DNA, 505 bp, Artificial Sequence
  Synthetic
gagcctcctgcccctcaccaggccctgttagcatcacctcgggcacctggccacagcaggggccagtcagggcaccccgggatagcacgcccaggccctgtgcaaggcctctggcacttaggagaggcttttgcccctttgtcctctgagcagaagggttggcaaagagggaaggggacaggccagttctgcacctggcctttctccagaatgaaggcctccacctcccgcacgtccccacagaaagaaaagtaaactgttttcgcggctgcgcagaaagaagaacatggtacgtgcagtgagtgctgcggaggggcgcagaggcccgcgccctggctggccctgtgcatgctgccttgcgccctgctcccaggtgctcactaacccgtaatctgctgctctgtgtgcagtgctgcccggcagggctgtcgtgtgcgtgttgggtgggaaggcggaggcggcgcggggcgggctggcctctgagcatctggctgcatttagcacg

SEQ ID NO: 602 - DNA, 506 bp, Artificial Sequence
  Synthetic
gagcctcctgcccctcaccaggccctgttagcatcacctcgggcacctggccacagcaggggccagtcagggcaccccgggatagcacgcccaggccctgtgcaaggcctctggcacttaggagaggcttttgcccctttgtcctctgagcagaagggttggcaaagagggaaggggacaggccagttctgcacctggcctttctccagaatgaaggcctccacctcccgcacgtccccacagaaagaaaagtaaactgttttcgcggctgcgcagaaagaagaacatggtacgtgcagtgagtgctgcggaggggcgcagaggcccgcgccctggctggccctgtgcatgctgccttgcgccctgctcccaggtgctcactaacccgtaatctgctgctctgtgtgcatgtgctgcccggcagggctgtcgtgtgcgtgttgggtgggaaggcggaggcggcgcggggcgggctggcctctgagcatctggctgcatttagcacg

SEQ ID NO: 603 - DNA, 501 bp, Artificial Sequence
  Synthetic
gagcctcctgcccctcaccaggccctgttagcatcacctcgggcacctggccacagcaggggccagtcagggcaccccgggatagcacgcccaggccctgtgcaaggcctctggcacttaggagaggcttttgcccctttgtcctctgagcagaagggttggcaaagagggaaggggacaggccagttctgcacctggcctttctccagaatgaaggcctccacctcccgcacgtccccacagaaagaaaagtaaactgttttcgcggctgcgcagaaagaagaacatggtaagtgcagtgagtgctgcggaggggcgcagaggcccgcgccctggctggccctgtgcatgcgccttgcgccctgctcccaggtgccactaacccgtaatctggctctgtgtgcagtgctgcccggcagggctgtcgtgtgcgtgttgggtgggaaggcggaggcggcgcggggcgggctggcctctgagcatctggctgcatttagcacg

SEQ ID NO: 604 - DNA, 502 bp, Artificial Sequence
  Synthetic
gagcctcctgcccctcaccaggccctgttagcatcacctcgggcacctggccacagcaggggccagtcagggcaccccgggatagcacgcccaggccctgtgcaaggcctctggcacttaggagaggcttttgcccctttgtcctctgagcagaagggttggcaaagagggaaggggacaggccagttctgcacctggcctttctccagaatgaaggcctccacctcccgcacgtccccacagaaagaaaagtaaactgttttcgcggctgcgcagaaagaagaacatggtaagtgcagtgagtgctgcggaggggcgcagaggcccgcgccctggctggccctgtgcatgcgccttgcgccctgctcccaggtgccactaacccgtaatctggctctgtgtgcatgtgctgcccggcagggctgtcgtgtgcgtgttgggtgggaaggcggaggcggcgcggggcgggctggcctctgagcatctggctgcatttagcacg

SEQ ID NO: 605 - DNA, 503 bp, Artificial Sequence
  Synthetic
gagcctcctgcccctcaccaggccctgttagcatcacctcgggcacctggccacagcaggggccagtcagggcaccccgggatagcacgcccaggccctgtgcaaggcctctggcacttaggagaggcttttgcccctttgtcctctgagcagaagggttggcaaagagggaaggggacaggccagttctgcacctggcctttctccagaatgaaggcctccacctcccgcacgtccccacagaaagaaaagtaaactgttttcgcggctgcgcagaaagaagaacatggtaagtgcagtgagtgctgcggaggggcgcagaggcccgcgccctggctggccctgtgcatgcgccttgcgccctgctcccaggtgccactaacccgtaatctgctgctctgtgtgcagtgctgcccggcagggctgtcgtgtgcgtgttgggtgggaaggcggaggcggcgcggggcgggctggcctctgagcatctggctgcatttagcacg

SEQ ID NO: 606 - DNA, 504 bp, Artificial Sequence
  Synthetic
gagcctcctgcccctcaccaggccctgttagcatcacctcgggcacctggccacagcaggggccagtcagggcaccccgggatagcacgcccaggccctgtgcaaggcctctggcacttaggagaggcttttgcccctttgtcctctgagcagaagggttggcaaagagggaaggggacaggccagttctgcacctggcctttctccagaatgaaggcctccacctcccgcacgtccccacagaaagaaaagtaaactgttttcgcggctgcgcagaaagaagaacatggtaagtgcagtgagtgctgcggaggggcgcagaggcccgcgccctggctggccctgtgcatgcgccttgcgccctgctcccaggtgccactaacccgtaatctgctgctctgtgtgcatgtgctgcccggcagggctgtcgtgtgcgtgttgggtgggaaggcggaggcggcgcggggcgggctggcctctgagcatctggctgcatttagcacg

SEQ ID NO: 607 - DNA, 502 bp, Artificial Sequence
  Synthetic
gagcctcctgcccctcaccaggccctgttagcatcacctcgggcacctggccacagcaggggccagtcagggcaccccgggatagcacgcccaggccctgtgcaaggcctctggcacttaggagaggcttttgcccctttgtcctctgagcagaagggttggcaaagagggaaggggacaggccagttctgcacctggcctttctccagaatgaaggcctccacctcccgcacgtccccacagaaagaaaagtaaactgttttcgcggctgcgcagaaagaagaacatggtaagtgcagtgagtgctgcggaggggcgcagaggcccgcgccctggctggccctgtgcatgcgccttgcgccctgctcccaggtgctcactaacccgtaatctggctctgtgtgcagtgctgcccggcagggctgtcgtgtgcgtgttgggtgggaaggcggaggcggcgcggggcgggctggcctctgagcatctggctgcatttagcacg

SEQ ID NO: 608 - DNA, 503 bp, Artificial Sequence
  Synthetic
gagcctcctgcccctcaccaggccctgttagcatcacctcgggcacctggccacagcaggggccagtcagggcaccccgggatagcacgcccaggccctgtgcaaggcctctggcacttaggagaggcttttgcccctttgtcctctgagcagaagggttggcaaagagggaaggggacaggccagttctgcacctggcctttctccagaatgaaggcctccacctcccgcacgtccccacagaaagaaaagtaaactgttttcgcggctgcgcagaaagaagaacatggtaagtgcagtgagtgctgcggaggggcgcagaggcccgcgccctggctggccctgtgcatgcgccttgcgccctgctcccaggtgctcactaacccgtaatctggctctgtgtgcatgtgctgcccggcagggctgtcgtgtgcgtgttgggtgggaaggcggaggcggcgcggggcgggctggcctctgagcatctggctgcatttagcacg

SEQ ID NO: 609 - DNA, 504 bp, Artificial Sequence
  Synthetic
gagcctcctgcccctcaccaggccctgttagcatcacctcgggcacctggccacagcaggggccagtcagggcaccccgggatagcacgcccaggccctgtgcaaggcctctggcacttaggagaggcttttgcccctttgtcctctgagcagaagggttggcaaagagggaaggggacaggccagttctgcacctggcctttctccagaatgaaggcctccacctcccgcacgtccccacagaaagaaaagtaaactgttttcgcggctgcgcagaaagaagaacatggtaagtgcagtgagtgctgcggaggggcgcagaggcccgcgccctggctggccctgtgcatgcgccttgcgccctgctcccaggtgctcactaacccgtaatctgctgctctgtgtgcagtgctgcccggcagggctgtcgtgtgcgtgttgggtgggaaggcggaggcggcgcggggcgggctggcctctgagcatctggctgcatttagcacg

SEQ ID NO: 610 - DNA, 505 bp, Artificial Sequence
  Synthetic
gagcctcctgcccctcaccaggccctgttagcatcacctcgggcacctggccacagcaggggccagtcagggcaccccgggatagcacgcccaggccctgtgcaaggcctctggcacttaggagaggcttttgcccctttgtcctctgagcagaagggttggcaaagagggaaggggacaggccagttctgcacctggcctttctccagaatgaaggcctccacctcccgcacgtccccacagaaagaaaagtaaactgttttcgcggctgcgcagaaagaagaacatggtaagtgcagtgagtgctgcggaggggcgcagaggcccgcgccctggctggccctgtgcatgcgccttgcgccctgctcccaggtgctcactaacccgtaatctgctgctctgtgtgcatgtgctgcccggcagggctgtcgtgtgcgtgttgggtgggaaggcggaggcggcgcggggcgggctggcctctgagcatctggctgcatttagcacg

SEQ ID NO: 611 - DNA, 502 bp, Artificial Sequence
  Synthetic
gagcctcctgcccctcaccaggccctgttagcatcacctcgggcacctggccacagcaggggccagtcagggcaccccgggatagcacgcccaggccctgtgcaaggcctctggcacttaggagaggcttttgcccctttgtcctctgagcagaagggttggcaaagagggaaggggacaggccagttctgcacctggcctttctccagaatgaaggcctccacctcccgcacgtccccacagaaagaaaagtaaactgttttcgcggctgcgcagaaagaagaacatggtaagtgcagtgagtgctgcggaggggcgcagaggcccgcgccctggctggccctgtgcatgctgccttgcgccctgctcccaggtgccactaacccgtaatctggctctgtgtgcagtgctgcccggcagggctgtcgtgtgcgtgttgggtgggaaggcggaggcggcgcggggcgggctggcctctgagcatctggctgcatttagcacg

SEQ ID NO: 612 - DNA, 503 bp, Artificial Sequence
  Synthetic
gagcctcctgcccctcaccaggccctgttagcatcacctcgggcacctggccacagcaggggccagtcagggcaccccgggatagcacgcccaggccctgtgcaaggcctctggcacttaggagaggcttttgcccctttgtcctctgagcagaagggttggcaaagagggaaggggacaggccagttctgcacctggcctttctccagaatgaaggcctccacctcccgcacgtccccacagaaagaaaagtaaactgttttcgcggctgcgcagaaagaagaacatggtaagtgcagtgagtgctgcggaggggcgcagaggcccgcgccctggctggccctgtgcatgctgccttgcgccctgctcccaggtgccactaacccgtaatctggctctgtgtgcatgtgctgcccggcagggctgtcgtgtgcgtgttgggtgggaaggcggaggcggcgcggggcgggctggcctctgagcatctggctgcatttagcacg

SEQ ID NO: 613 - DNA, 504 bp, Artificial Sequence
  Synthetic
gagcctcctgcccctcaccaggccctgttagcatcacctcgggcacctggccacagcaggggccagtcagggcaccccgggatagcacgcccaggccctgtgcaaggcctctggcacttaggagaggcttttgcccctttgtcctctgagcagaagggttggcaaagagggaaggggacaggccagttctgcacctggcctttctccagaatgaaggcctccacctcccgcacgtccccacagaaagaaaagtaaactgttttcgcggctgcgcagaaagaagaacatggtaagtgcagtgagtgctgcggaggggcgcagaggcccgcgccctggctggccctgtgcatgctgccttgcgccctgctcccaggtgccactaacccgtaatctgctgctctgtgtgcagtgctgcccggcagggctgtcgtgtgcgtgttgggtgggaaggcggaggcggcgcggggcgggctggcctctgagcatctggctgcatttagcacg

SEQ ID NO: 614 - DNA, 505 bp, Artificial Sequence
  Synthetic
gagcctcctgcccctcaccaggccctgttagcatcacctcgggcacctggccacagcaggggccagtcagggcaccccgggatagcacgcccaggccctgtgcaaggcctctggcacttaggagaggcttttgcccctttgtcctctgagcagaagggttggcaaagagggaaggggacaggccagttctgcacctggcctttctccagaatgaaggcctccacctcccgcacgtccccacagaaagaaaagtaaactgttttcgcggctgcgcagaaagaagaacatggtaagtgcagtgagtgctgcggaggggcgcagaggcccgcgccctggctggccctgtgcatgctgccttgcgccctgctcccaggtgccactaacccgtaatctgctgctctgtgtgcatgtgctgcccggcagggctgtcgtgtgcgtgttgggtgggaaggcggaggcggcgcggggcgggctggcctctgagcatctggctgcatttagcacg

SEQ ID NO: 615 - DNA, 503 bp, Artificial Sequence
  Synthetic
gagcctcctgcccctcaccaggccctgttagcatcacctcgggcacctggccacagcaggggccagtcagggcaccccgggatagcacgcccaggccctgtgcaaggcctctggcacttaggagaggcttttgcccctttgtcctctgagcagaagggttggcaaagagggaaggggacaggccagttctgcacctggcctttctccagaatgaaggcctccacctcccgcacgtccccacagaaagaaaagtaaactgttttcgcggctgcgcagaaagaagaacatggtaagtgcagtgagtgctgcggaggggcgcagaggcccgcgccctggctggccctgtgcatgctgccttgcgccctgctcccaggtgctcactaacccgtaatctggctctgtgtgcagtgctgcccggcagggctgtcgtgtgcgtgttgggtgggaaggcggaggcggcgcggggcgggctggcctctgagcatctggctgcatttagcacg

SEQ ID NO: 616 - DNA, 504 bp, Artificial Sequence
  Synthetic
gagcctcctgcccctcaccaggccctgttagcatcacctcgggcacctggccacagcaggggccagtcagggcaccccgggatagcacgcccaggccctgtgcaaggcctctggcacttaggagaggcttttgcccctttgtcctctgagcagaagggttggcaaagagggaaggggacaggccagttctgcacctggcctttctccagaatgaaggcctccacctcccgcacgtccccacagaaagaaaagtaaactgttttcgcggctgcgcagaaagaagaacatggtaagtgcagtgagtgctgcggaggggcgcagaggcccgcgccctggctggccctgtgcatgctgccttgcgccctgctcccaggtgctcactaacccgtaatctggctctgtgtgcatgtgctgcccggcagggctgtcgtgtgcgtgttgggtgggaaggcggaggcggcgcggggcgggctggcctctgagcatctggctgcatttagcacg

SEQ ID NO: 617 - DNA, 505 bp, Artificial Sequence
  Synthetic
gagcctcctgcccctcaccaggccctgttagcatcacctcgggcacctggccacagcaggggccagtcagggcaccccgggatagcacgcccaggccctgtgcaaggcctctggcacttaggagaggcttttgcccctttgtcctctgagcagaagggttggcaaagagggaaggggacaggccagttctgcacctggcctttctccagaatgaaggcctccacctcccgcacgtccccacagaaagaaaagtaaactgttttcgcggctgcgcagaaagaagaacatggtaagtgcagtgagtgctgcggaggggcgcagaggcccgcgccctggctggccctgtgcatgctgccttgcgccctgctcccaggtgctcactaacccgtaatctgctgctctgtgtgcagtgctgcccggcagggctgtcgtgtgcgtgttgggtgggaaggcggaggcggcgcggggcgggctggcctctgagcatctggctgcatttagcacg

SEQ ID NO: 618 - DNA, 506 bp, Artificial Sequence
  Synthetic
gagcctcctgcccctcaccaggccctgttagcatcacctcgggcacctggccacagcaggggccagtcagggcaccccgggatagcacgcccaggccctgtgcaaggcctctggcacttaggagaggcttttgcccctttgtcctctgagcagaagggttggcaaagagggaaggggacaggccagttctgcacctggcctttctccagaatgaaggcctccacctcccgcacgtccccacagaaagaaaagtaaactgttttcgcggctgcgcagaaagaagaacatggtaagtgcagtgagtgctgcggaggggcgcagaggcccgcgccctggctggccctgtgcatgctgccttgcgccctgctcccaggtgctcactaacccgtaatctgctgctctgtgtgcatgtgctgcccggcagggctgtcgtgtgcgtgttgggtgggaaggcggaggcggcgcggggcgggctggcctctgagcatctggctgcatttagcacg

SEQ ID NO: 619 - DNA, 501 bp, Artificial Sequence
  Synthetic
gagcctcctgcccctcaccaggccctgttagcatcacctcgggcacctggccacagcaggggccagtcagggcaccccgggatagcacgcccaggccctgtgcaaggcctctggcacttaggagaggcttttgcccctttgtcctctgagcagaagggttggcaaagagggaaggggacaggccagttctgcacctggcctttctccagaatgaaggcctccacctcccgcacgtccccacagaaagaaaagtaaactgttttcgcggctgcgcagaaagaagaacatggtaggtgcagtgagtgctgcggaggggcgcagaggcccgcgccctggctggccctgtgcatgcgccttgcgccctgctcccaggtgccactaacccgtaatctggctctgtgtgcagtgctgcccggcagggctgtcgtgtgcgtgttgggtgggaaggcggaggcggcgcggggcgggctggcctctgagcatctggctgcatttagcacg

SEQ ID NO: 620 - DNA, 502 bp, Artificial Sequence
  Synthetic
gagcctcctgcccctcaccaggccctgttagcatcacctcgggcacctggccacagcaggggccagtcagggcaccccgggatagcacgcccaggccctgtgcaaggcctctggcacttaggagaggcttttgcccctttgtcctctgagcagaagggttggcaaagagggaaggggacaggccagttctgcacctggcctttctccagaatgaaggcctccacctcccgcacgtccccacagaaagaaaagtaaactgttttcgcggctgcgcagaaagaagaacatggtaggtgcagtgagtgctgcggaggggcgcagaggcccgcgccctggctggccctgtgcatgcgccttgcgccctgctcccaggtgccactaacccgtaatctggctctgtgtgcatgtgctgcccggcagggctgtcgtgtgcgtgttgggtgggaaggcggaggcggcgcggggcgggctggcctctgagcatctggctgcatttagcacg

SEQ ID NO: 621 - DNA, 503 bp, Artificial Sequence
  Synthetic
gagcctcctgcccctcaccaggccctgttagcatcacctcgggcacctggccacagcaggggccagtcagggcaccccgggatagcacgcccaggccctgtgcaaggcctctggcacttaggagaggcttttgcccctttgtcctctgagcagaagggttggcaaagagggaaggggacaggccagttctgcacctggcctttctccagaatgaaggcctccacctcccgcacgtccccacagaaagaaaagtaaactgttttcgcggctgcgcagaaagaagaacatggtaggtgcagtgagtgctgcggaggggcgcagaggcccgcgccctggctggccctgtgcatgcgccttgcgccctgctcccaggtgccactaacccgtaatctgctgctctgtgtgcagtgctgcccggcagggctgtcgtgtgcgtgttgggtgggaaggcggaggcggcgcggggcgggctggcctctgagcatctggctgcatttagcacg

SEQ ID NO: 622 - DNA, 504 bp, Artificial Sequence
  Synthetic
gagcctcctgcccctcaccaggccctgttagcatcacctcgggcacctggccacagcaggggccagtcagggcaccccgggatagcacgcccaggccctgtgcaaggcctctggcacttaggagaggcttttgcccctttgtcctctgagcagaagggttggcaaagagggaaggggacaggccagttctgcacctggcctttctccagaatgaaggcctccacctcccgcacgtccccacagaaagaaaagtaaactgttttcgcggctgcgcagaaagaagaacatggtaggtgcagtgagtgctgcggaggggcgcagaggcccgcgccctggctggccctgtgcatgcgccttgcgccctgctcccaggtgccactaacccgtaatctgctgctctgtgtgcatgtgctgcccggcagggctgtcgtgtgcgtgttgggtgggaaggcggaggcggcgcggggcgggctggcctctgagcatctggctgcatttagcacg

SEQ ID NO: 623 - DNA, 502 bp, Artificial Sequence
  Synthetic
gagcctcctgcccctcaccaggccctgttagcatcacctcgggcacctggccacagcaggggccagtcagggcaccccgggatagcacgcccaggccctgtgcaaggcctctggcacttaggagaggcttttgcccctttgtcctctgagcagaagggttggcaaagagggaaggggacaggccagttctgcacctggcctttctccagaatgaaggcctccacctcccgcacgtccccacagaaagaaaagtaaactgttttcgcggctgcgcagaaagaagaacatggtaggtgcagtgagtgctgcggaggggcgcagaggcccgcgccctggctggccctgtgcatgcgccttgcgccctgctcccaggtgctcactaacccgtaatctggctctgtgtgcagtgctgcccggcagggctgtcgtgtgcgtgttgggtgggaaggcggaggcggcgcggggcgggctggcctctgagcatctggctgcatttagcacg

SEQ ID NO: 624 - DNA, 503 bp, Artificial Sequence
  Synthetic
gagcctcctgcccctcaccaggccctgttagcatcacctcgggcacctggccacagcaggggccagtcagggcaccccgggatagcacgcccaggccctgtgcaaggcctctggcacttaggagaggcttttgcccctttgtcctctgagcagaagggttggcaaagagggaaggggacaggccagttctgcacctggcctttctccagaatgaaggcctccacctcccgcacgtccccacagaaagaaaagtaaactgttttcgcggctgcgcagaaagaagaacatggtaggtgcagtgagtgctgcggaggggcgcagaggcccgcgccctggctggccctgtgcatgcgccttgcgccctgctcccaggtgctcactaacccgtaatctggctctgtgtgcatgtgctgcccggcagggctgtcgtgtgcgtgttgggtgggaaggcggaggcggcgcggggcgggctggcctctgagcatctggctgcatttagcacg

SEQ ID NO: 625 - DNA, 504 bp, Artificial Sequence
  Synthetic
gagcctcctgcccctcaccaggccctgttagcatcacctcgggcacctggccacagcaggggccagtcagggcaccccgggatagcacgcccaggccctgtgcaaggcctctggcacttaggagaggcttttgcccctttgtcctctgagcagaagggttggcaaagagggaaggggacaggccagttctgcacctggcctttctccagaatgaaggcctccacctcccgcacgtccccacagaaagaaaagtaaactgttttcgcggctgcgcagaaagaagaacatggtaggtgcagtgagtgctgcggaggggcgcagaggcccgcgccctggctggccctgtgcatgcgccttgcgccctgctcccaggtgctcactaacccgtaatctgctgctctgtgtgcagtgctgcccggcagggctgtcgtgtgcgtgttgggtgggaaggcggaggcggcgcggggcgggctggcctctgagcatctggctgcatttagcacg

SEQ ID NO: 626 - DNA, 505 bp, Artificial Sequence
  Synthetic
gagcctcctgcccctcaccaggccctgttagcatcacctcgggcacctggccacagcaggggccagtcagggcaccccgggatagcacgcccaggccctgtgcaaggcctctggcacttaggagaggcttttgcccctttgtcctctgagcagaagggttggcaaagagggaaggggacaggccagttctgcacctggcctttctccagaatgaaggcctccacctcccgcacgtccccacagaaagaaaagtaaactgttttcgcggctgcgcagaaagaagaacatggtaggtgcagtgagtgctgcggaggggcgcagaggcccgcgccctggctggccctgtgcatgcgccttgcgccctgctcccaggtgctcactaacccgtaatctgctgctctgtgtgcatgtgctgcccggcagggctgtcgtgtgcgtgttgggtgggaaggcggaggcggcgcggggcgggctggcctctgagcatctggctgcatttagcacg

SEQ ID NO: 627 - DNA, 502 bp, Artificial Sequence
  Synthetic
gagcctcctgcccctcaccaggccctgttagcatcacctcgggcacctggccacagcaggggccagtcagggcaccccgggatagcacgcccaggccctgtgcaaggcctctggcacttaggagaggcttttgcccctttgtcctctgagcagaagggttggcaaagagggaaggggacaggccagttctgcacctggcctttctccagaatgaaggcctccacctcccgcacgtccccacagaaagaaaagtaaactgttttcgcggctgcgcagaaagaagaacatggtaggtgcagtgagtgctgcggaggggcgcagaggcccgcgccctggctggccctgtgcatgctgccttgcgccctgctcccaggtgccactaacccgtaatctggctctgtgtgcagtgctgcccggcagggctgtcgtgtgcgtgttgggtgggaaggcggaggcggcgcggggcgggctggcctctgagcatctggctgcatttagcacg

SEQ ID NO: 628 - DNA, 503 bp, Artificial Sequence
  Synthetic
gagcctcctgcccctcaccaggccctgttagcatcacctcgggcacctggccacagcaggggccagtcagggcaccccgggatagcacgcccaggccctgtgcaaggcctctggcacttaggagaggcttttgcccctttgtcctctgagcagaagggttggcaaagagggaaggggacaggccagttctgcacctggcctttctccagaatgaaggcctccacctcccgcacgtccccacagaaagaaaagtaaactgttttcgcggctgcgcagaaagaagaacatggtaggtgcagtgagtgctgcggaggggcgcagaggcccgcgccctggctggccctgtgcatgctgccttgcgccctgctcccaggtgccactaacccgtaatctggctctgtgtgcatgtgctgcccggcagggctgtcgtgtgcgtgttgggtgggaaggcggaggcggcgcggggcgggctggcctctgagcatctggctgcatttagcacg

SEQ ID NO: 629 - DNA, 504 bp, Artificial Sequence
  Synthetic
gagcctcctgcccctcaccaggccctgttagcatcacctcgggcacctggccacagcaggggccagtcagggcaccccgggatagcacgcccaggccctgtgcaaggcctctggcacttaggagaggcttttgcccctttgtcctctgagcagaagggttggcaaagagggaaggggacaggccagttctgcacctggcctttctccagaatgaaggcctccacctcccgcacgtccccacagaaagaaaagtaaactgttttcgcggctgcgcagaaagaagaacatggtaggtgcagtgagtgctgcggaggggcgcagaggcccgcgccctggctggccctgtgcatgctgccttgcgccctgctcccaggtgccactaacccgtaatctgctgctctgtgtgcagtgctgcccggcagggctgtcgtgtgcgtgttgggtgggaaggcggaggcggcgcggggcgggctggcctctgagcatctggctgcatttagcacg

SEQ ID NO: 630 - DNA, 505 bp, Artificial Sequence
  Synthetic
gagcctcctgcccctcaccaggccctgttagcatcacctcgggcacctggccacagcaggggccagtcagggcaccccgggatagcacgcccaggccctgtgcaaggcctctggcacttaggagaggcttttgcccctttgtcctctgagcagaagggttggcaaagagggaaggggacaggccagttctgcacctggcctttctccagaatgaaggcctccacctcccgcacgtccccacagaaagaaaagtaaactgttttcgcggctgcgcagaaagaagaacatggtaggtgcagtgagtgctgcggaggggcgcagaggcccgcgccctggctggccctgtgcatgctgccttgcgccctgctcccaggtgccactaacccgtaatctgctgctctgtgtgcatgtgctgcccggcagggctgtcgtgtgcgtgttgggtgggaaggcggaggcggcgcggggcgggctggcctctgagcatctggctgcatttagcacg

SEQ ID NO: 631 - DNA, 503 bp, Artificial Sequence
  Synthetic
gagcctcctgcccctcaccaggccctgttagcatcacctcgggcacctggccacagcaggggccagtcagggcaccccgggatagcacgcccaggccctgtgcaaggcctctggcacttaggagaggcttttgcccctttgtcctctgagcagaagggttggcaaagagggaaggggacaggccagttctgcacctggcctttctccagaatgaaggcctccacctcccgcacgtccccacagaaagaaaagtaaactgttttcgcggctgcgcagaaagaagaacatggtaggtgcagtgagtgctgcggaggggcgcagaggcccgcgccctggctggccctgtgcatgctgccttgcgccctgctcccaggtgctcactaacccgtaatctggctctgtgtgcagtgctgcccggcagggctgtcgtgtgcgtgttgggtgggaaggcggaggcggcgcggggcgggctggcctctgagcatctggctgcatttagcacg

SEQ ID NO: 632 - DNA, 504 bp, Artificial Sequence
  Synthetic
gagcctcctgcccctcaccaggccctgttagcatcacctcgggcacctggccacagcaggggccagtcagggcaccccgggatagcacgcccaggccctgtgcaaggcctctggcacttaggagaggcttttgcccctttgtcctctgagcagaagggttggcaaagagggaaggggacaggccagttctgcacctggcctttctccagaatgaaggcctccacctcccgcacgtccccacagaaagaaaagtaaactgttttcgcggctgcgcagaaagaagaacatggtaggtgcagtgagtgctgcggaggggcgcagaggcccgcgccctggctggccctgtgcatgctgccttgcgccctgctcccaggtgctcactaacccgtaatctggctctgtgtgcatgtgctgcccggcagggctgtcgtgtgcgtgttgggtgggaaggcggaggcggcgcggggcgggctggcctctgagcatctggctgcatttagcacg

SEQ ID NO: 633 - DNA, 505 bp, Artificial Sequence
  Synthetic
gagcctcctgcccctcaccaggccctgttagcatcacctcgggcacctggccacagcaggggccagtcagggcaccccgggatagcacgcccaggccctgtgcaaggcctctggcacttaggagaggcttttgcccctttgtcctctgagcagaagggttggcaaagagggaaggggacaggccagttctgcacctggcctttctccagaatgaaggcctccacctcccgcacgtccccacagaaagaaaagtaaactgttttcgcggctgcgcagaaagaagaacatggtaggtgcagtgagtgctgcggaggggcgcagaggcccgcgccctggctggccctgtgcatgctgccttgcgccctgctcccaggtgctcactaacccgtaatctgctgctctgtgtgcagtgctgcccggcagggctgtcgtgtgcgtgttgggtgggaaggcggaggcggcgcggggcgggctggcctctgagcatctggctgcatttagcacg

SEQ ID NO: 634 - DNA, 506 bp, Artificial Sequence
  Synthetic
gagcctcctgcccctcaccaggccctgttagcatcacctcgggcacctggccacagcaggggccagtcagggcaccccgggatagcacgcccaggccctgtgcaaggcctctggcacttaggagaggcttttgcccctttgtcctctgagcagaagggttggcaaagagggaaggggacaggccagttctgcacctggcctttctccagaatgaaggcctccacctcccgcacgtccccacagaaagaaaagtaaactgttttcgcggctgcgcagaaagaagaacatggtaggtgcagtgagtgctgcggaggggcgcagaggcccgcgccctggctggccctgtgcatgctgccttgcgccctgctcccaggtgctcactaacccgtaatctgctgctctgtgtgcatgtgctgcccggcagggctgtcgtgtgcgtgttgggtgggaaggcggaggcggcgcggggcgggctggcctctgagcatctggctgcatttagcacg

SEQ ID NO: 635 - DNA, 501 bp, Artificial Sequence
  Synthetic
gagcctcctgcccctcaccaggccctgttagcatcacctcgggcacctggccacagcaggggccagtcagggcaccccgggatagcacgcccaggccctgtgcaaggcctctggcacttaggagaggcttttgcccctttgtcctctgagcagaagggttggcaaagagggaaggggacaggccagttctgcacctggcctttctccagaatgaaggcctccacctcccgcacgtccccacagaaagaaaagtaaactgttttcgcggctgcgcagaaagaagaacatggtatgtgcagtgagtgctgcggaggggcgcagaggcccgcgccctggctggccctgtgcatgcgccttgcgccctgctcccaggtgccactaacccgtaatctggctctgtgtgcagtgctgcccggcagggctgtcgtgtgcgtgttgggtgggaaggcggaggcggcgcggggcgggctggcctctgagcatctggctgcatttagcacg

SEQ ID NO: 636 - DNA, 502 bp, Artificial Sequence
  Synthetic
gagcctcctgcccctcaccaggccctgttagcatcacctcgggcacctggccacagcaggggccagtcagggcaccccgggatagcacgcccaggccctgtgcaaggcctctggcacttaggagaggcttttgcccctttgtcctctgagcagaagggttggcaaagagggaaggggacaggccagttctgcacctggcctttctccagaatgaaggcctccacctcccgcacgtccccacagaaagaaaagtaaactgttttcgcggctgcgcagaaagaagaacatggtatgtgcagtgagtgctgcggaggggcgcagaggcccgcgccctggctggccctgtgcatgcgccttgcgccctgctcccaggtgccactaacccgtaatctggctctgtgtgcatgtgctgcccggcagggctgtcgtgtgcgtgttgggtgggaaggcggaggcggcgcggggcgggctggcctctgagcatctggctgcatttagcacg

SEQ ID NO: 637 - DNA, 503 bp, Artificial Sequence
  Synthetic
gagcctcctgcccctcaccaggccctgttagcatcacctcgggcacctggccacagcaggggccagtcagggcaccccgggatagcacgcccaggccctgtgcaaggcctctggcacttaggagaggcttttgcccctttgtcctctgagcagaagggttggcaaagagggaaggggacaggccagttctgcacctggcctttctccagaatgaaggcctccacctcccgcacgtccccacagaaagaaaagtaaactgttttcgcggctgcgcagaaagaagaacatggtatgtgcagtgagtgctgcggaggggcgcagaggcccgcgccctggctggccctgtgcatgcgccttgcgccctgctcccaggtgccactaacccgtaatctgctgctctgtgtgcagtgctgcccggcagggctgtcgtgtgcgtgttgggtgggaaggcggaggcggcgcggggcgggctggcctctgagcatctggctgcatttagcacg

SEQ ID NO: 638 - DNA, 504 bp, Artificial Sequence
  Synthetic
gagcctcctgcccctcaccaggccctgttagcatcacctcgggcacctggccacagcaggggccagtcagggcaccccgggatagcacgcccaggccctgtgcaaggcctctggcacttaggagaggcttttgcccctttgtcctctgagcagaagggttggcaaagagggaaggggacaggccagttctgcacctggcctttctccagaatgaaggcctccacctcccgcacgtccccacagaaagaaaagtaaactgttttcgcggctgcgcagaaagaagaacatggtatgtgcagtgagtgctgcggaggggcgcagaggcccgcgccctggctggccctgtgcatgcgccttgcgccctgctcccaggtgccactaacccgtaatctgctgctctgtgtgcatgtgctgcccggcagggctgtcgtgtgcgtgttgggtgggaaggcggaggcggcgcggggcgggctggcctctgagcatctggctgcatttagcacg

SEQ ID NO: 639 - DNA, 502 bp, Artificial Sequence
  Synthetic
gagcctcctgcccctcaccaggccctgttagcatcacctcgggcacctggccacagcaggggccagtcagggcaccccgggatagcacgcccaggccctgtgcaaggcctctggcacttaggagaggcttttgcccctttgtcctctgagcagaagggttggcaaagagggaaggggacaggccagttctgcacctggcctttctccagaatgaaggcctccacctcccgcacgtccccacagaaagaaaagtaaactgttttcgcggctgcgcagaaagaagaacatggtatgtgcagtgagtgctgcggaggggcgcagaggcccgcgccctggctggccctgtgcatgcgccttgcgccctgctcccaggtgctcactaacccgtaatctggctctgtgtgcagtgctgcccggcagggctgtcgtgtgcgtgttgggtgggaaggcggaggcggcgcggggcgggctggcctctgagcatctggctgcatttagcacg

SEQ ID NO: 640 - DNA, 503 bp, Artificial Sequence
  Synthetic
gagcctcctgcccctcaccaggccctgttagcatcacctcgggcacctggccacagcaggggccagtcagggcaccccgggatagcacgcccaggccctgtgcaaggcctctggcacttaggagaggcttttgcccctttgtcctctgagcagaagggttggcaaagagggaaggggacaggccagttctgcacctggcctttctccagaatgaaggcctccacctcccgcacgtccccacagaaagaaaagtaaactgttttcgcggctgcgcagaaagaagaacatggtatgtgcagtgagtgctgcggaggggcgcagaggcccgcgccctggctggccctgtgcatgcgccttgcgccctgctcccaggtgctcactaacccgtaatctggctctgtgtgcatgtgctgcccggcagggctgtcgtgtgcgtgttgggtgggaaggcggaggcggcgcggggcgggctggcctctgagcatctggctgcatttagcacg

SEQ ID NO: 641 - DNA, 504 bp, Artificial Sequence
  Synthetic
gagcctcctgcccctcaccaggccctgttagcatcacctcgggcacctggccacagcaggggccagtcagggcaccccgggatagcacgcccaggccctgtgcaaggcctctggcacttaggagaggcttttgcccctttgtcctctgagcagaagggttggcaaagagggaaggggacaggccagttctgcacctggcctttctccagaatgaaggcctccacctcccgcacgtccccacagaaagaaaagtaaactgttttcgcggctgcgcagaaagaagaacatggtatgtgcagtgagtgctgcggaggggcgcagaggcccgcgccctggctggccctgtgcatgcgccttgcgccctgctcccaggtgctcactaacccgtaatctgctgctctgtgtgcagtgctgcccggcagggctgtcgtgtgcgtgttgggtgggaaggcggaggcggcgcggggcgggctggcctctgagcatctggctgcatttagcacg

SEQ ID NO: 642 - DNA, 505 bp, Artificial Sequence
  Synthetic
gagcctcctgcccctcaccaggccctgttagcatcacctcgggcacctggccacagcaggggccagtcagggcaccccgggatagcacgcccaggccctgtgcaaggcctctggcacttaggagaggcttttgcccctttgtcctctgagcagaagggttggcaaagagggaaggggacaggccagttctgcacctggcctttctccagaatgaaggcctccacctcccgcacgtccccacagaaagaaaagtaaactgttttcgcggctgcgcagaaagaagaacatggtatgtgcagtgagtgctgcggaggggcgcagaggcccgcgccctggctggccctgtgcatgcgccttgcgccctgctcccaggtgctcactaacccgtaatctgctgctctgtgtgcatgtgctgcccggcagggctgtcgtgtgcgtgttgggtgggaaggcggaggcggcgcggggcgggctggcctctgagcatctggctgcatttagcacg

SEQ ID NO: 643 - DNA, 502 bp, Artificial Sequence
  Synthetic
gagcctcctgcccctcaccaggccctgttagcatcacctcgggcacctggccacagcaggggccagtcagggcaccccgggatagcacgcccaggccctgtgcaaggcctctggcacttaggagaggcttttgcccctttgtcctctgagcagaagggttggcaaagagggaaggggacaggccagttctgcacctggcctttctccagaatgaaggcctccacctcccgcacgtccccacagaaagaaaagtaaactgttttcgcggctgcgcagaaagaagaacatggtatgtgcagtgagtgctgcggaggggcgcagaggcccgcgccctggctggccctgtgcatgctgccttgcgccctgctcccaggtgccactaacccgtaatctggctctgtgtgcagtgctgcccggcagggctgtcgtgtgcgtgttgggtgggaaggcggaggcggcgcggggcgggctggcctctgagcatctggctgcatttagcacg

SEQ ID NO: 644 - DNA, 503 bp, Artificial Sequence
  Synthetic
gagcctcctgcccctcaccaggccctgttagcatcacctcgggcacctggccacagcaggggccagtcagggcaccccgggatagcacgcccaggccctgtgcaaggcctctggcacttaggagaggcttttgcccctttgtcctctgagcagaagggttggcaaagagggaaggggacaggccagttctgcacctggcctttctccagaatgaaggcctccacctcccgcacgtccccacagaaagaaaagtaaactgttttcgcggctgcgcagaaagaagaacatggtatgtgcagtgagtgctgcggaggggcgcagaggcccgcgccctggctggccctgtgcatgctgccttgcgccctgctcccaggtgccactaacccgtaatctggctctgtgtgcatgtgctgcccggcagggctgtcgtgtgcgtgttgggtgggaaggcggaggcggcgcggggcgggctggcctctgagcatctggctgcatttagcacg

SEQ ID NO: 645 - DNA, 504 bp, Artificial Sequence
  Synthetic
gagcctcctgcccctcaccaggccctgttagcatcacctcgggcacctggccacagcaggggccagtcagggcaccccgggatagcacgcccaggccctgtgcaaggcctctggcacttaggagaggcttttgcccctttgtcctctgagcagaagggttggcaaagagggaaggggacaggccagttctgcacctggcctttctccagaatgaaggcctccacctcccgcacgtccccacagaaagaaaagtaaactgttttcgcggctgcgcagaaagaagaacatggtatgtgcagtgagtgctgcggaggggcgcagaggcccgcgccctggctggccctgtgcatgctgccttgcgccctgctcccaggtgccactaacccgtaatctgctgctctgtgtgcagtgctgcccggcagggctgtcgtgtgcgtgttgggtgggaaggcggaggcggcgcggggcgggctggcctctgagcatctggctgcatttagcacg

SEQ ID NO: 646 - DNA, 505 bp, Artificial Sequence
  Synthetic
gagcctcctgcccctcaccaggccctgttagcatcacctcgggcacctggccacagcaggggccagtcagggcaccccgggatagcacgcccaggccctgtgcaaggcctctggcacttaggagaggcttttgcccctttgtcctctgagcagaagggttggcaaagagggaaggggacaggccagttctgcacctggcctttctccagaatgaaggcctccacctcccgcacgtccccacagaaagaaaagtaaactgttttcgcggctgcgcagaaagaagaacatggtatgtgcagtgagtgctgcggaggggcgcagaggcccgcgccctggctggccctgtgcatgctgccttgcgccctgctcccaggtgccactaacccgtaatctgctgctctgtgtgcatgtgctgcccggcagggctgtcgtgtgcgtgttgggtgggaaggcggaggcggcgcggggcgggctggcctctgagcatctggctgcatttagcacg

SEQ ID NO: 647 - DNA, 503 bp, Artificial Sequence
  Synthetic
gagcctcctgcccctcaccaggccctgttagcatcacctcgggcacctggccacagcaggggccagtcagggcaccccgggatagcacgcccaggccctgtgcaaggcctctggcacttaggagaggcttttgcccctttgtcctctgagcagaagggttggcaaagagggaaggggacaggccagttctgcacctggcctttctccagaatgaaggcctccacctcccgcacgtccccacagaaagaaaagtaaactgttttcgcggctgcgcagaaagaagaacatggtatgtgcagtgagtgctgcggaggggcgcagaggcccgcgccctggctggccctgtgcatgctgccttgcgccctgctcccaggtgctcactaacccgtaatctggctctgtgtgcagtgctgcccggcagggctgtcgtgtgcgtgttgggtgggaaggcggaggcggcgcggggcgggctggcctctgagcatctggctgcatttagcacg

SEQ ID NO: 648 - DNA, 504 bp, Artificial Sequence
  Synthetic
gagcctcctgcccctcaccaggccctgttagcatcacctcgggcacctggccacagcaggggccagtcagggcaccccgggatagcacgcccaggccctgtgcaaggcctctggcacttaggagaggcttttgcccctttgtcctctgagcagaagggttggcaaagagggaaggggacaggccagttctgcacctggcctttctccagaatgaaggcctccacctcccgcacgtccccacagaaagaaaagtaaactgttttcgcggctgcgcagaaagaagaacatggtatgtgcagtgagtgctgcggaggggcgcagaggcccgcgccctggctggccctgtgcatgctgccttgcgccctgctcccaggtgctcactaacccgtaatctggctctgtgtgcatgtgctgcccggcagggctgtcgtgtgcgtgttgggtgggaaggcggaggcggcgcggggcgggctggcctctgagcatctggctgcatttagcacg

SEQ ID NO: 649 - DNA, 505 bp, Artificial Sequence
  Synthetic
gagcctcctgcccctcaccaggccctgttagcatcacctcgggcacctggccacagcaggggccagtcagggcaccccgggatagcacgcccaggccctgtgcaaggcctctggcacttaggagaggcttttgcccctttgtcctctgagcagaagggttggcaaagagggaaggggacaggccagttctgcacctggcctttctccagaatgaaggcctccacctcccgcacgtccccacagaaagaaaagtaaactgttttcgcggctgcgcagaaagaagaacatggtatgtgcagtgagtgctgcggaggggcgcagaggcccgcgccctggctggccctgtgcatgctgccttgcgccctgctcccaggtgctcactaacccgtaatctgctgctctgtgtgcagtgctgcccggcagggctgtcgtgtgcgtgttgggtgggaaggcggaggcggcgcggggcgggctggcctctgagcatctggctgcatttagcacg

SEQ ID NO: 650 - DNA, 506 bp, Artificial Sequence
  Synthetic
gagcctcctgcccctcaccaggccctgttagcatcacctcgggcacctggccacagcaggggccagtcagggcaccccgggatagcacgcccaggccctgtgcaaggcctctggcacttaggagaggcttttgcccctttgtcctctgagcagaagggttggcaaagagggaaggggacaggccagttctgcacctggcctttctccagaatgaaggcctccacctcccgcacgtccccacagaaagaaaagtaaactgttttcgcggctgcgcagaaagaagaacatggtatgtgcagtgagtgctgcggaggggcgcagaggcccgcgccctggctggccctgtgcatgctgccttgcgccctgctcccaggtgctcactaacccgtaatctgctgctctgtgtgcatgtgctgcccggcagggctgtcgtgtgcgtgttgggtgggaaggcggaggcggcgcggggcgggctggcctctgagcatctggctgcatttagcacg

SEQ ID NO: 651 - DNA, 501 bp, Artificial Sequence
  Synthetic
gagcctcctgcccctcaccaggccctgttagcatcacctcgggcacctggccacagcaggggccagtcagggcaccccgggatagcacgcccaggccctgtgcaaggcctctggcacttaggagaggcttttgcccctttgtcctctgagcagaagggttggcaaagagggaaggggacaggccagttctgcacctggcctttctccagaatgaaggcctccacctcccgcacgtccccacagaaagaaaagtaaactgttttcgcggctgcgcagaaagaagaacatggtacgagcagtgagtgctgcggaggggcgcagaggcccgcgccctggctggccctgtgcatgcgccttgcgccctgctcccaggtgccactaacccgtaatctggctctgtgtgcagtgctgcccggcagggctgtcgtgtgcgtgttgggtgggaaggcggaggcggcgcggggcgggctggcctctgagcatctggctgcatttagcacg

SEQ ID NO: 652 - DNA, 502 bp, Artificial Sequence
  Synthetic
gagcctcctgcccctcaccaggccctgttagcatcacctcgggcacctggccacagcaggggccagtcagggcaccccgggatagcacgcccaggccctgtgcaaggcctctggcacttaggagaggcttttgcccctttgtcctctgagcagaagggttggcaaagagggaaggggacaggccagttctgcacctggcctttctccagaatgaaggcctccacctcccgcacgtccccacagaaagaaaagtaaactgttttcgcggctgcgcagaaagaagaacatggtacgagcagtgagtgctgcggaggggcgcagaggcccgcgccctggctggccctgtgcatgcgccttgcgccctgctcccaggtgccactaacccgtaatctggctctgtgtgcatgtgctgcccggcagggctgtcgtgtgcgtgttgggtgggaaggcggaggcggcgcggggcgggctggcctctgagcatctggctgcatttagcacg

SEQ ID NO: 653 - DNA, 503 bp, Artificial Sequence
  Synthetic
gagcctcctgcccctcaccaggccctgttagcatcacctcgggcacctggccacagcaggggccagtcagggcaccccgggatagcacgcccaggccctgtgcaaggcctctggcacttaggagaggcttttgcccctttgtcctctgagcagaagggttggcaaagagggaaggggacaggccagttctgcacctggcctttctccagaatgaaggcctccacctcccgcacgtccccacagaaagaaaagtaaactgttttcgcggctgcgcagaaagaagaacatggtacgagcagtgagtgctgcggaggggcgcagaggcccgcgccctggctggccctgtgcatgcgccttgcgccctgctcccaggtgccactaacccgtaatctgctgctctgtgtgcagtgctgcccggcagggctgtcgtgtgcgtgttgggtgggaaggcggaggcggcgcggggcgggctggcctctgagcatctggctgcatttagcacg

SEQ ID NO: 654 - DNA, 504 bp, Artificial Sequence
  Synthetic
gagcctcctgcccctcaccaggccctgttagcatcacctcgggcacctggccacagcaggggccagtcagggcaccccgggatagcacgcccaggccctgtgcaaggcctctggcacttaggagaggcttttgcccctttgtcctctgagcagaagggttggcaaagagggaaggggacaggccagttctgcacctggcctttctccagaatgaaggcctccacctcccgcacgtccccacagaaagaaaagtaaactgttttcgcggctgcgcagaaagaagaacatggtacgagcagtgagtgctgcggaggggcgcagaggcccgcgccctggctggccctgtgcatgcgccttgcgccctgctcccaggtgccactaacccgtaatctgctgctctgtgtgcatgtgctgcccggcagggctgtcgtgtgcgtgttgggtgggaaggcggaggcggcgcggggcgggctggcctctgagcatctggctgcatttagcacg

SEQ ID NO: 655 - DNA, 502 bp, Artificial Sequence
  Synthetic
gagcctcctgcccctcaccaggccctgttagcatcacctcgggcacctggccacagcaggggccagtcagggcaccccgggatagcacgcccaggccctgtgcaaggcctctggcacttaggagaggcttttgcccctttgtcctctgagcagaagggttggcaaagagggaaggggacaggccagttctgcacctggcctttctccagaatgaaggcctccacctcccgcacgtccccacagaaagaaaagtaaactgttttcgcggctgcgcagaaagaagaacatggtacgagcagtgagtgctgcggaggggcgcagaggcccgcgccctggctggccctgtgcatgcgccttgcgccctgctcccaggtgctcactaacccgtaatctggctctgtgtgcagtgctgcccggcagggctgtcgtgtgcgtgttgggtgggaaggcggaggcggcgcggggcgggctggcctctgagcatctggctgcatttagcacg

SEQ ID NO: 656 - DNA, 503 bp, Artificial Sequence
  Synthetic
gagcctcctgcccctcaccaggccctgttagcatcacctcgggcacctggccacagcaggggccagtcagggcaccccgggatagcacgcccaggccctgtgcaaggcctctggcacttaggagaggcttttgcccctttgtcctctgagcagaagggttggcaaagagggaaggggacaggccagttctgcacctggcctttctccagaatgaaggcctccacctcccgcacgtccccacagaaagaaaagtaaactgttttcgcggctgcgcagaaagaagaacatggtacgagcagtgagtgctgcggaggggcgcagaggcccgcgccctggctggccctgtgcatgcgccttgcgccctgctcccaggtgctcactaacccgtaatctggctctgtgtgcatgtgctgcccggcagggctgtcgtgtgcgtgttgggtgggaaggcggaggcggcgcggggcgggctggcctctgagcatctggctgcatttagcacg

SEQ ID NO: 657 - DNA, 504 bp, Artificial Sequence
  Synthetic
gagcctcctgcccctcaccaggccctgttagcatcacctcgggcacctggccacagcaggggccagtcagggcaccccgggatagcacgcccaggccctgtgcaaggcctctggcacttaggagaggcttttgcccctttgtcctctgagcagaagggttggcaaagagggaaggggacaggccagttctgcacctggcctttctccagaatgaaggcctccacctcccgcacgtccccacagaaagaaaagtaaactgttttcgcggctgcgcagaaagaagaacatggtacgagcagtgagtgctgcggaggggcgcagaggcccgcgccctggctggccctgtgcatgcgccttgcgccctgctcccaggtgctcactaacccgtaatctgctgctctgtgtgcagtgctgcccggcagggctgtcgtgtgcgtgttgggtgggaaggcggaggcggcgcggggcgggctggcctctgagcatctggctgcatttagcacg

SEQ ID NO: 658 - DNA, 505 bp, Artificial Sequence
  Synthetic
gagcctcctgcccctcaccaggccctgttagcatcacctcgggcacctggccacagcaggggccagtcagggcaccccgggatagcacgcccaggccctgtgcaaggcctctggcacttaggagaggcttttgcccctttgtcctctgagcagaagggttggcaaagagggaaggggacaggccagttctgcacctggcctttctccagaatgaaggcctccacctcccgcacgtccccacagaaagaaaagtaaactgttttcgcggctgcgcagaaagaagaacatggtacgagcagtgagtgctgcggaggggcgcagaggcccgcgccctggctggccctgtgcatgcgccttgcgccctgctcccaggtgctcactaacccgtaatctgctgctctgtgtgcatgtgctgcccggcagggctgtcgtgtgcgtgttgggtgggaaggcggaggcggcgcggggcgggctggcctctgagcatctggctgcatttagcacg

SEQ ID NO: 659 - DNA, 502 bp, Artificial Sequence
  Synthetic
gagcctcctgcccctcaccaggccctgttagcatcacctcgggcacctggccacagcaggggccagtcagggcaccccgggatagcacgcccaggccctgtgcaaggcctctggcacttaggagaggcttttgcccctttgtcctctgagcagaagggttggcaaagagggaaggggacaggccagttctgcacctggcctttctccagaatgaaggcctccacctcccgcacgtccccacagaaagaaaagtaaactgttttcgcggctgcgcagaaagaagaacatggtacgagcagtgagtgctgcggaggggcgcagaggcccgcgccctggctggccctgtgcatgctgccttgcgccctgctcccaggtgccactaacccgtaatctggctctgtgtgcagtgctgcccggcagggctgtcgtgtgcgtgttgggtgggaaggcggaggcggcgcggggcgggctggcctctgagcatctggctgcatttagcacg

SEQ ID NO: 660 - DNA, 503 bp, Artificial Sequence
  Synthetic
gagcctcctgcccctcaccaggccctgttagcatcacctcgggcacctggccacagcaggggccagtcagggcaccccgggatagcacgcccaggccctgtgcaaggcctctggcacttaggagaggcttttgcccctttgtcctctgagcagaagggttggcaaagagggaaggggacaggccagttctgcacctggcctttctccagaatgaaggcctccacctcccgcacgtccccacagaaagaaaagtaaactgttttcgcggctgcgcagaaagaagaacatggtacgagcagtgagtgctgcggaggggcgcagaggcccgcgccctggctggccctgtgcatgctgccttgcgccctgctcccaggtgccactaacccgtaatctggctctgtgtgcatgtgctgcccggcagggctgtcgtgtgcgtgttgggtgggaaggcggaggcggcgcggggcgggctggcctctgagcatctggctgcatttagcacg

SEQ ID NO: 661 - DNA, 504 bp, Artificial Sequence
  Synthetic
gagcctcctgcccctcaccaggccctgttagcatcacctcgggcacctggccacagcaggggccagtcagggcaccccgggatagcacgcccaggccctgtgcaaggcctctggcacttaggagaggcttttgcccctttgtcctctgagcagaagggttggcaaagagggaaggggacaggccagttctgcacctggcctttctccagaatgaaggcctccacctcccgcacgtccccacagaaagaaaagtaaactgttttcgcggctgcgcagaaagaagaacatggtacgagcagtgagtgctgcggaggggcgcagaggcccgcgccctggctggccctgtgcatgctgccttgcgccctgctcccaggtgccactaacccgtaatctgctgctctgtgtgcagtgctgcccggcagggctgtcgtgtgcgtgttgggtgggaaggcggaggcggcgcggggcgggctggcctctgagcatctggctgcatttagcacg

SEQ ID NO: 662 - DNA, 505 bp, Artificial Sequence
  Synthetic
gagcctcctgcccctcaccaggccctgttagcatcacctcgggcacctggccacagcaggggccagtcagggcaccccgggatagcacgcccaggccctgtgcaaggcctctggcacttaggagaggcttttgcccctttgtcctctgagcagaagggttggcaaagagggaaggggacaggccagttctgcacctggcctttctccagaatgaaggcctccacctcccgcacgtccccacagaaagaaaagtaaactgttttcgcggctgcgcagaaagaagaacatggtacgagcagtgagtgctgcggaggggcgcagaggcccgcgccctggctggccctgtgcatgctgccttgcgccctgctcccaggtgccactaacccgtaatctgctgctctgtgtgcatgtgctgcccggcagggctgtcgtgtgcgtgttgggtgggaaggcggaggcggcgcggggcgggctggcctctgagcatctggctgcatttagcacg

SEQ ID NO: 663 - DNA, 503 bp, Artificial Sequence
  Synthetic
gagcctcctgcccctcaccaggccctgttagcatcacctcgggcacctggccacagcaggggccagtcagggcaccccgggatagcacgcccaggccctgtgcaaggcctctggcacttaggagaggcttttgcccctttgtcctctgagcagaagggttggcaaagagggaaggggacaggccagttctgcacctggcctttctccagaatgaaggcctccacctcccgcacgtccccacagaaagaaaagtaaactgttttcgcggctgcgcagaaagaagaacatggtacgagcagtgagtgctgcggaggggcgcagaggcccgcgccctggctggccctgtgcatgctgccttgcgccctgctcccaggtgctcactaacccgtaatctggctctgtgtgcagtgctgcccggcagggctgtcgtgtgcgtgttgggtgggaaggcggaggcggcgcggggcgggctggcctctgagcatctggctgcatttagcacg

SEQ ID NO: 664 - DNA, 504 bp, Artificial Sequence
  Synthetic
gagcctcctgcccctcaccaggccctgttagcatcacctcgggcacctggccacagcaggggccagtcagggcaccccgggatagcacgcccaggccctgtgcaaggcctctggcacttaggagaggcttttgcccctttgtcctctgagcagaagggttggcaaagagggaaggggacaggccagttctgcacctggcctttctccagaatgaaggcctccacctcccgcacgtccccacagaaagaaaagtaaactgttttcgcggctgcgcagaaagaagaacatggtacgagcagtgagtgctgcggaggggcgcagaggcccgcgccctggctggccctgtgcatgctgccttgcgccctgctcccaggtgctcactaacccgtaatctggctctgtgtgcatgtgctgcccggcagggctgtcgtgtgcgtgttgggtgggaaggcggaggcggcgcggggcgggctggcctctgagcatctggctgcatttagcacg

SEQ ID NO: 665 - DNA, 505 bp, Artificial Sequence
  Synthetic
gagcctcctgcccctcaccaggccctgttagcatcacctcgggcacctggccacagcaggggccagtcagggcaccccgggatagcacgcccaggccctgtgcaaggcctctggcacttaggagaggcttttgcccctttgtcctctgagcagaagggttggcaaagagggaaggggacaggccagttctgcacctggcctttctccagaatgaaggcctccacctcccgcacgtccccacagaaagaaaagtaaactgttttcgcggctgcgcagaaagaagaacatggtacgagcagtgagtgctgcggaggggcgcagaggcccgcgccctggctggccctgtgcatgctgccttgcgccctgctcccaggtgctcactaacccgtaatctgctgctctgtgtgcagtgctgcccggcagggctgtcgtgtgcgtgttgggtgggaaggcggaggcggcgcggggcgggctggcctctgagcatctggctgcatttagcacg

SEQ ID NO: 666 - DNA, 506 bp, Artificial Sequence
  Synthetic
gagcctcctgcccctcaccaggccctgttagcatcacctcgggcacctggccacagcaggggccagtcagggcaccccgggatagcacgcccaggccctgtgcaaggcctctggcacttaggagaggcttttgcccctttgtcctctgagcagaagggttggcaaagagggaaggggacaggccagttctgcacctggcctttctccagaatgaaggcctccacctcccgcacgtccccacagaaagaaaagtaaactgttttcgcggctgcgcagaaagaagaacatggtacgagcagtgagtgctgcggaggggcgcagaggcccgcgccctggctggccctgtgcatgctgccttgcgccctgctcccaggtgctcactaacccgtaatctgctgctctgtgtgcatgtgctgcccggcagggctgtcgtgtgcgtgttgggtgggaaggcggaggcggcgcggggcgggctggcctctgagcatctggctgcatttagcacg

SEQ ID NO: 667 - DNA, 501 bp, Artificial Sequence
  Synthetic
gagcctcctgcccctcaccaggccctgttagcatcacctcgggcacctggccacagcaggggccagtcagggcaccccgggatagcacgcccaggccctgtgcaaggcctctggcacttaggagaggcttttgcccctttgtcctctgagcagaagggttggcaaagagggaaggggacaggccagttctgcacctggcctttctccagaatgaaggcctccacctcccgcacgtccccacagaaagaaaagtaaactgttttcgcggctgcgcagaaagaagaacatggttcgtgcagtgagtgctgcggaggggcgcagaggcccgcgccctggctggccctgtgcatgcgccttgcgccctgctcccaggtgccactaacccgtaatctggctctgtgtgcagtgctgcccggcagggctgtcgtgtgcgtgttgggtgggaaggcggaggcggcgcggggcgggctggcctctgagcatctggctgcatttagcacg

SEQ ID NO: 668 - DNA, 502 bp, Artificial Sequence
  Synthetic
gagcctcctgcccctcaccaggccctgttagcatcacctcgggcacctggccacagcaggggccagtcagggcaccccgggatagcacgcccaggccctgtgcaaggcctctggcacttaggagaggcttttgcccctttgtcctctgagcagaagggttggcaaagagggaaggggacaggccagttctgcacctggcctttctccagaatgaaggcctccacctcccgcacgtccccacagaaagaaaagtaaactgttttcgcggctgcgcagaaagaagaacatggttcgtgcagtgagtgctgcggaggggcgcagaggcccgcgccctggctggccctgtgcatgcgccttgcgccctgctcccaggtgccactaacccgtaatctggctctgtgtgcatgtgctgcccggcagggctgtcgtgtgcgtgttgggtgggaaggcggaggcggcgcggggcgggctggcctctgagcatctggctgcatttagcacg

SEQ ID NO: 669 - DNA, 503 bp, Artificial Sequence
  Synthetic
gagcctcctgcccctcaccaggccctgttagcatcacctcgggcacctggccacagcaggggccagtcagggcaccccgggatagcacgcccaggccctgtgcaaggcctctggcacttaggagaggcttttgcccctttgtcctctgagcagaagggttggcaaagagggaaggggacaggccagttctgcacctggcctttctccagaatgaaggcctccacctcccgcacgtccccacagaaagaaaagtaaactgttttcgcggctgcgcagaaagaagaacatggttcgtgcagtgagtgctgcggaggggcgcagaggcccgcgccctggctggccctgtgcatgcgccttgcgccctgctcccaggtgccactaacccgtaatctgctgctctgtgtgcagtgctgcccggcagggctgtcgtgtgcgtgttgggtgggaaggcggaggcggcgcggggcgggctggcctctgagcatctggctgcatttagcacg

SEQ ID NO: 670 - DNA, 504 bp, Artificial Sequence
  Synthetic
gagcctcctgcccctcaccaggccctgttagcatcacctcgggcacctggccacagcaggggccagtcagggcaccccgggatagcacgcccaggccctgtgcaaggcctctggcacttaggagaggcttttgcccctttgtcctctgagcagaagggttggcaaagagggaaggggacaggccagttctgcacctggcctttctccagaatgaaggcctccacctcccgcacgtccccacagaaagaaaagtaaactgttttcgcggctgcgcagaaagaagaacatggttcgtgcagtgagtgctgcggaggggcgcagaggcccgcgccctggctggccctgtgcatgcgccttgcgccctgctcccaggtgccactaacccgtaatctgctgctctgtgtgcatgtgctgcccggcagggctgtcgtgtgcgtgttgggtgggaaggcggaggcggcgcggggcgggctggcctctgagcatctggctgcatttagcacg

SEQ ID NO: 671 - DNA, 502 bp, Artificial Sequence
  Synthetic
gagcctcctgcccctcaccaggccctgttagcatcacctcgggcacctggccacagcaggggccagtcagggcaccccgggatagcacgcccaggccctgtgcaaggcctctggcacttaggagaggcttttgcccctttgtcctctgagcagaagggttggcaaagagggaaggggacaggccagttctgcacctggcctttctccagaatgaaggcctccacctcccgcacgtccccacagaaagaaaagtaaactgttttcgcggctgcgcagaaagaagaacatggttcgtgcagtgagtgctgcggaggggcgcagaggcccgcgccctggctggccctgtgcatgcgccttgcgccctgctcccaggtgctcactaacccgtaatctggctctgtgtgcagtgctgcccggcagggctgtcgtgtgcgtgttgggtgggaaggcggaggcggcgcggggcgggctggcctctgagcatctggctgcatttagcacg

SEQ ID NO: 672 - DNA, 503 bp, Artificial Sequence
  Synthetic
gagcctcctgcccctcaccaggccctgttagcatcacctcgggcacctggccacagcaggggccagtcagggcaccccgggatagcacgcccaggccctgtgcaaggcctctggcacttaggagaggcttttgcccctttgtcctctgagcagaagggttggcaaagagggaaggggacaggccagttctgcacctggcctttctccagaatgaaggcctccacctcccgcacgtccccacagaaagaaaagtaaactgttttcgcggctgcgcagaaagaagaacatggttcgtgcagtgagtgctgcggaggggcgcagaggcccgcgccctggctggccctgtgcatgcgccttgcgccctgctcccaggtgctcactaacccgtaatctggctctgtgtgcatgtgctgcccggcagggctgtcgtgtgcgtgttgggtgggaaggcggaggcggcgcggggcgggctggcctctgagcatctggctgcatttagcacg

SEQ ID NO: 673 - DNA, 504 bp, Artificial Sequence
  Synthetic
gagcctcctgcccctcaccaggccctgttagcatcacctcgggcacctggccacagcaggggccagtcagggcaccccgggatagcacgcccaggccctgtgcaaggcctctggcacttaggagaggcttttgcccctttgtcctctgagcagaagggttggcaaagagggaaggggacaggccagttctgcacctggcctttctccagaatgaaggcctccacctcccgcacgtccccacagaaagaaaagtaaactgttttcgcggctgcgcagaaagaagaacatggttcgtgcagtgagtgctgcggaggggcgcagaggcccgcgccctggctggccctgtgcatgcgccttgcgccctgctcccaggtgctcactaacccgtaatctgctgctctgtgtgcagtgctgcccggcagggctgtcgtgtgcgtgttgggtgggaaggcggaggcggcgcggggcgggctggcctctgagcatctggctgcatttagcacg

SEQ ID NO: 674 - DNA, 505 bp, Artificial Sequence
  Synthetic
gagcctcctgcccctcaccaggccctgttagcatcacctcgggcacctggccacagcaggggccagtcagggcaccccgggatagcacgcccaggccctgtgcaaggcctctggcacttaggagaggcttttgcccctttgtcctctgagcagaagggttggcaaagagggaaggggacaggccagttctgcacctggcctttctccagaatgaaggcctccacctcccgcacgtccccacagaaagaaaagtaaactgttttcgcggctgcgcagaaagaagaacatggttcgtgcagtgagtgctgcggaggggcgcagaggcccgcgccctggctggccctgtgcatgcgccttgcgccctgctcccaggtgctcactaacccgtaatctgctgctctgtgtgcatgtgctgcccggcagggctgtcgtgtgcgtgttgggtgggaaggcggaggcggcgcggggcgggctggcctctgagcatctggctgcatttagcacg

SEQ ID NO: 675 - DNA, 502 bp, Artificial Sequence
  Synthetic
gagcctcctgcccctcaccaggccctgttagcatcacctcgggcacctggccacagcaggggccagtcagggcaccccgggatagcacgcccaggccctgtgcaaggcctctggcacttaggagaggcttttgcccctttgtcctctgagcagaagggttggcaaagagggaaggggacaggccagttctgcacctggcctttctccagaatgaaggcctccacctcccgcacgtccccacagaaagaaaagtaaactgttttcgcggctgcgcagaaagaagaacatggttcgtgcagtgagtgctgcggaggggcgcagaggcccgcgccctggctggccctgtgcatgctgccttgcgccctgctcccaggtgccactaacccgtaatctggctctgtgtgcagtgctgcccggcagggctgtcgtgtgcgtgttgggtgggaaggcggaggcggcgcggggcgggctggcctctgagcatctggctgcatttagcacg

SEQ ID NO: 676 - DNA, 503 bp, Artificial Sequence
  Synthetic
gagcctcctgcccctcaccaggccctgttagcatcacctcgggcacctggccacagcaggggccagtcagggcaccccgggatagcacgcccaggccctgtgcaaggcctctggcacttaggagaggcttttgcccctttgtcctctgagcagaagggttggcaaagagggaaggggacaggccagttctgcacctggcctttctccagaatgaaggcctccacctcccgcacgtccccacagaaagaaaagtaaactgttttcgcggctgcgcagaaagaagaacatggttcgtgcagtgagtgctgcggaggggcgcagaggcccgcgccctggctggccctgtgcatgctgccttgcgccctgctcccaggtgccactaacccgtaatctggctctgtgtgcatgtgctgcccggcagggctgtcgtgtgcgtgttgggtgggaaggcggaggcggcgcggggcgggctggcctctgagcatctggctgcatttagcacg

SEQ ID NO: 677 - DNA, 504 bp, Artificial Sequence
  Synthetic
gagcctcctgcccctcaccaggccctgttagcatcacctcgggcacctggccacagcaggggccagtcagggcaccccgggatagcacgcccaggccctgtgcaaggcctctggcacttaggagaggcttttgcccctttgtcctctgagcagaagggttggcaaagagggaaggggacaggccagttctgcacctggcctttctccagaatgaaggcctccacctcccgcacgtccccacagaaagaaaagtaaactgttttcgcggctgcgcagaaagaagaacatggttcgtgcagtgagtgctgcggaggggcgcagaggcccgcgccctggctggccctgtgcatgctgccttgcgccctgctcccaggtgccactaacccgtaatctgctgctctgtgtgcagtgctgcccggcagggctgtcgtgtgcgtgttgggtgggaaggcggaggcggcgcggggcgggctggcctctgagcatctggctgcatttagcacg

SEQ ID NO: 678 - DNA, 505 bp, Artificial Sequence
  Synthetic
gagcctcctgcccctcaccaggccctgttagcatcacctcgggcacctggccacagcaggggccagtcagggcaccccgggatagcacgcccaggccctgtgcaaggcctctggcacttaggagaggcttttgcccctttgtcctctgagcagaagggttggcaaagagggaaggggacaggccagttctgcacctggcctttctccagaatgaaggcctccacctcccgcacgtccccacagaaagaaaagtaaactgttttcgcggctgcgcagaaagaagaacatggttcgtgcagtgagtgctgcggaggggcgcagaggcccgcgccctggctggccctgtgcatgctgccttgcgccctgctcccaggtgccactaacccgtaatctgctgctctgtgtgcatgtgctgcccggcagggctgtcgtgtgcgtgttgggtgggaaggcggaggcggcgcggggcgggctggcctctgagcatctggctgcatttagcacg

SEQ ID NO: 679 - DNA, 503 bp, Artificial Sequence
  Synthetic
gagcctcctgcccctcaccaggccctgttagcatcacctcgggcacctggccacagcaggggccagtcagggcaccccgggatagcacgcccaggccctgtgcaaggcctctggcacttaggagaggcttttgcccctttgtcctctgagcagaagggttggcaaagagggaaggggacaggccagttctgcacctggcctttctccagaatgaaggcctccacctcccgcacgtccccacagaaagaaaagtaaactgttttcgcggctgcgcagaaagaagaacatggttcgtgcagtgagtgctgcggaggggcgcagaggcccgcgccctggctggccctgtgcatgctgccttgcgccctgctcccaggtgctcactaacccgtaatctggctctgtgtgcagtgctgcccggcagggctgtcgtgtgcgtgttgggtgggaaggcggaggcggcgcggggcgggctggcctctgagcatctggctgcatttagcacg

SEQ ID NO: 680 - DNA, 504 bp, Artificial Sequence
  Synthetic
gagcctcctgcccctcaccaggccctgttagcatcacctcgggcacctggccacagcaggggccagtcagggcaccccgggatagcacgcccaggccctgtgcaaggcctctggcacttaggagaggcttttgcccctttgtcctctgagcagaagggttggcaaagagggaaggggacaggccagttctgcacctggcctttctccagaatgaaggcctccacctcccgcacgtccccacagaaagaaaagtaaactgttttcgcggctgcgcagaaagaagaacatggttcgtgcagtgagtgctgcggaggggcgcagaggcccgcgccctggctggccctgtgcatgctgccttgcgccctgctcccaggtgctcactaacccgtaatctggctctgtgtgcatgtgctgcccggcagggctgtcgtgtgcgtgttgggtgggaaggcggaggcggcgcggggcgggctggcctctgagcatctggctgcatttagcacg

SEQ ID NO: 681 - DNA, 505 bp, Artificial Sequence
  Synthetic
gagcctcctgcccctcaccaggccctgttagcatcacctcgggcacctggccacagcaggggccagtcagggcaccccgggatagcacgcccaggccctgtgcaaggcctctggcacttaggagaggcttttgcccctttgtcctctgagcagaagggttggcaaagagggaaggggacaggccagttctgcacctggcctttctccagaatgaaggcctccacctcccgcacgtccccacagaaagaaaagtaaactgttttcgcggctgcgcagaaagaagaacatggttcgtgcagtgagtgctgcggaggggcgcagaggcccgcgccctggctggccctgtgcatgctgccttgcgccctgctcccaggtgctcactaacccgtaatctgctgctctgtgtgcagtgctgcccggcagggctgtcgtgtgcgtgttgggtgggaaggcggaggcggcgcggggcgggctggcctctgagcatctggctgcatttagcacg

SEQ ID NO: 682 - DNA, 506 bp, Artificial Sequence
  Synthetic
gagcctcctgcccctcaccaggccctgttagcatcacctcgggcacctggccacagcaggggccagtcagggcaccccgggatagcacgcccaggccctgtgcaaggcctctggcacttaggagaggcttttgcccctttgtcctctgagcagaagggttggcaaagagggaaggggacaggccagttctgcacctggcctttctccagaatgaaggcctccacctcccgcacgtccccacagaaagaaaagtaaactgttttcgcggctgcgcagaaagaagaacatggttcgtgcagtgagtgctgcggaggggcgcagaggcccgcgccctggctggccctgtgcatgctgccttgcgccctgctcccaggtgctcactaacccgtaatctgctgctctgtgtgcatgtgctgcccggcagggctgtcgtgtgcgtgttgggtgggaaggcggaggcggcgcggggcgggctggcctctgagcatctggctgcatttagcacg

SEQ ID NO: 683 - DNA, 501 bp, Artificial Sequence
  Synthetic
gagcctcctgcccctcaccaggccctgttagcatcacctcgggcacctggccacagcaggggccagtcagggcaccccgggatagcacgcccaggccctgtgcaaggcctctggcacttaggagaggcttttgcccctttgtcctctgagcagaagggttggcaaagagggaaggggacaggccagttctgcacctggcctttctccagaatgaaggcctccacctcccgtccgcacccacagaaagaaaagtaaactgttttcgcggctgcgcagaaagaagaacatggtacgtgcagtgagtgctgcggaggggcgcagaggcccgcgccctggctggccctgtgcatgcgccttgcgccctgctcccaggtgccactaacccgtaatctggctctgtgtgcagtgctgcccggcagggctgtcgtgtgcgtgttgggtgggaaggcggaggcggcgcggggcgggctggcctctgagcatctggctgcatttagcacg

SEQ ID NO: 684 - DNA, 502 bp, Artificial Sequence
  Synthetic
gagcctcctgcccctcaccaggccctgttagcatcacctcgggcacctggccacagcaggggccagtcagggcaccccgggatagcacgcccaggccctgtgcaaggcctctggcacttaggagaggcttttgcccctttgtcctctgagcagaagggttggcaaagagggaaggggacaggccagttctgcacctggcctttctccagaatgaaggcctccacctcccgtccgcacccacagaaagaaaagtaaactgttttcgcggctgcgcagaaagaagaacatggtacgtgcagtgagtgctgcggaggggcgcagaggcccgcgccctggctggccctgtgcatgcgccttgcgccctgctcccaggtgccactaacccgtaatctggctctgtgtgcatgtgctgcccggcagggctgtcgtgtgcgtgttgggtgggaaggcggaggcggcgcggggcgggctggcctctgagcatctggctgcatttagcacg

SEQ ID NO: 685 - DNA, 503 bp, Artificial Sequence
  Synthetic
gagcctcctgcccctcaccaggccctgttagcatcacctcgggcacctggccacagcaggggccagtcagggcaccccgggatagcacgcccaggccctgtgcaaggcctctggcacttaggagaggcttttgcccctttgtcctctgagcagaagggttggcaaagagggaaggggacaggccagttctgcacctggcctttctccagaatgaaggcctccacctcccgtccgcacccacagaaagaaaagtaaactgttttcgcggctgcgcagaaagaagaacatggtacgtgcagtgagtgctgcggaggggcgcagaggcccgcgccctggctggccctgtgcatgcgccttgcgccctgctcccaggtgccactaacccgtaatctgctgctctgtgtgcagtgctgcccggcagggctgtcgtgtgcgtgttgggtgggaaggcggaggcggcgcggggcgggctggcctctgagcatctggctgcatttagcacg

SEQ ID NO: 686 - DNA, 504 bp, Artificial Sequence
  Synthetic
gagcctcctgcccctcaccaggccctgttagcatcacctcgggcacctggccacagcaggggccagtcagggcaccccgggatagcacgcccaggccctgtgcaaggcctctggcacttaggagaggcttttgcccctttgtcctctgagcagaagggttggcaaagagggaaggggacaggccagttctgcacctggcctttctccagaatgaaggcctccacctcccgtccgcacccacagaaagaaaagtaaactgttttcgcggctgcgcagaaagaagaacatggtacgtgcagtgagtgctgcggaggggcgcagaggcccgcgccctggctggccctgtgcatgcgccttgcgccctgctcccaggtgccactaacccgtaatctgctgctctgtgtgcatgtgctgcccggcagggctgtcgtgtgcgtgttgggtgggaaggcggaggcggcgcggggcgggctggcctctgagcatctggctgcatttagcacg

SEQ ID NO: 687 - DNA, 502 bp, Artificial Sequence
  Synthetic
gagcctcctgcccctcaccaggccctgttagcatcacctcgggcacctggccacagcaggggccagtcagggcaccccgggatagcacgcccaggccctgtgcaaggcctctggcacttaggagaggcttttgcccctttgtcctctgagcagaagggttggcaaagagggaaggggacaggccagttctgcacctggcctttctccagaatgaaggcctccacctcccgtccgcacccacagaaagaaaagtaaactgttttcgcggctgcgcagaaagaagaacatggtacgtgcagtgagtgctgcggaggggcgcagaggcccgcgccctggctggccctgtgcatgcgccttgcgccctgctcccaggtgctcactaacccgtaatctggctctgtgtgcagtgctgcccggcagggctgtcgtgtgcgtgttgggtgggaaggcggaggcggcgcggggcgggctggcctctgagcatctggctgcatttagcacg

SEQ ID NO: 688 - DNA, 503 bp, Artificial Sequence
  Synthetic
gagcctcctgcccctcaccaggccctgttagcatcacctcgggcacctggccacagcaggggccagtcagggcaccccgggatagcacgcccaggccctgtgcaaggcctctggcacttaggagaggcttttgcccctttgtcctctgagcagaagggttggcaaagagggaaggggacaggccagttctgcacctggcctttctccagaatgaaggcctccacctcccgtccgcacccacagaaagaaaagtaaactgttttcgcggctgcgcagaaagaagaacatggtacgtgcagtgagtgctgcggaggggcgcagaggcccgcgccctggctggccctgtgcatgcgccttgcgccctgctcccaggtgctcactaacccgtaatctggctctgtgtgcatgtgctgcccggcagggctgtcgtgtgcgtgttgggtgggaaggcggaggcggcgcggggcgggctggcctctgagcatctggctgcatttagcacg

SEQ ID NO: 689 - DNA, 504 bp, Artificial Sequence
  Synthetic
gagcctcctgcccctcaccaggccctgttagcatcacctcgggcacctggccacagcaggggccagtcagggcaccccgggatagcacgcccaggccctgtgcaaggcctctggcacttaggagaggcttttgcccctttgtcctctgagcagaagggttggcaaagagggaaggggacaggccagttctgcacctggcctttctccagaatgaaggcctccacctcccgtccgcacccacagaaagaaaagtaaactgttttcgcggctgcgcagaaagaagaacatggtacgtgcagtgagtgctgcggaggggcgcagaggcccgcgccctggctggccctgtgcatgcgccttgcgccctgctcccaggtgctcactaacccgtaatctgctgctctgtgtgcagtgctgcccggcagggctgtcgtgtgcgtgttgggtgggaaggcggaggcggcgcggggcgggctggcctctgagcatctggctgcatttagcacg

SEQ ID NO: 690 - DNA, 505 bp, Artificial Sequence
  Synthetic
gagcctcctgcccctcaccaggccctgttagcatcacctcgggcacctggccacagcaggggccagtcagggcaccccgggatagcacgcccaggccctgtgcaaggcctctggcacttaggagaggcttttgcccctttgtcctctgagcagaagggttggcaaagagggaaggggacaggccagttctgcacctggcctttctccagaatgaaggcctccacctcccgtccgcacccacagaaagaaaagtaaactgttttcgcggctgcgcagaaagaagaacatggtacgtgcagtgagtgctgcggaggggcgcagaggcccgcgccctggctggccctgtgcatgcgccttgcgccctgctcccaggtgctcactaacccgtaatctgctgctctgtgtgcatgtgctgcccggcagggctgtcgtgtgcgtgttgggtgggaaggcggaggcggcgcggggcgggctggcctctgagcatctggctgcatttagcacg

SEQ ID NO: 691 - DNA, 502 bp, Artificial Sequence
  Synthetic
gagcctcctgcccctcaccaggccctgttagcatcacctcgggcacctggccacagcaggggccagtcagggcaccccgggatagcacgcccaggccctgtgcaaggcctctggcacttaggagaggcttttgcccctttgtcctctgagcagaagggttggcaaagagggaaggggacaggccagttctgcacctggcctttctccagaatgaaggcctccacctcccgtccgcacccacagaaagaaaagtaaactgttttcgcggctgcgcagaaagaagaacatggtacgtgcagtgagtgctgcggaggggcgcagaggcccgcgccctggctggccctgtgcatgctgccttgcgccctgctcccaggtgccactaacccgtaatctggctctgtgtgcagtgctgcccggcagggctgtcgtgtgcgtgttgggtgggaaggcggaggcggcgcggggcgggctggcctctgagcatctggctgcatttagcacg

SEQ ID NO: 692 - DNA, 503 bp, Artificial Sequence
  Synthetic
gagcctcctgcccctcaccaggccctgttagcatcacctcgggcacctggccacagcaggggccagtcagggcaccccgggatagcacgcccaggccctgtgcaaggcctctggcacttaggagaggcttttgcccctttgtcctctgagcagaagggttggcaaagagggaaggggacaggccagttctgcacctggcctttctccagaatgaaggcctccacctcccgtccgcacccacagaaagaaaagtaaactgttttcgcggctgcgcagaaagaagaacatggtacgtgcagtgagtgctgcggaggggcgcagaggcccgcgccctggctggccctgtgcatgctgccttgcgccctgctcccaggtgccactaacccgtaatctggctctgtgtgcatgtgctgcccggcagggctgtcgtgtgcgtgttgggtgggaaggcggaggcggcgcggggcgggctggcctctgagcatctggctgcatttagcacg

SEQ ID NO: 693 - DNA, 504 bp, Artificial Sequence
  Synthetic
gagcctcctgcccctcaccaggccctgttagcatcacctcgggcacctggccacagcaggggccagtcagggcaccccgggatagcacgcccaggccctgtgcaaggcctctggcacttaggagaggcttttgcccctttgtcctctgagcagaagggttggcaaagagggaaggggacaggccagttctgcacctggcctttctccagaatgaaggcctccacctcccgtccgcacccacagaaagaaaagtaaactgttttcgcggctgcgcagaaagaagaacatggtacgtgcagtgagtgctgcggaggggcgcagaggcccgcgccctggctggccctgtgcatgctgccttgcgccctgctcccaggtgccactaacccgtaatctgctgctctgtgtgcagtgctgcccggcagggctgtcgtgtgcgtgttgggtgggaaggcggaggcggcgcggggcgggctggcctctgagcatctggctgcatttagcacg

SEQ ID NO: 694 - DNA, 505 bp, Artificial Sequence
  Synthetic
gagcctcctgcccctcaccaggccctgttagcatcacctcgggcacctggccacagcaggggccagtcagggcaccccgggatagcacgcccaggccctgtgcaaggcctctggcacttaggagaggcttttgcccctttgtcctctgagcagaagggttggcaaagagggaaggggacaggccagttctgcacctggcctttctccagaatgaaggcctccacctcccgtccgcacccacagaaagaaaagtaaactgttttcgcggctgcgcagaaagaagaacatggtacgtgcagtgagtgctgcggaggggcgcagaggcccgcgccctggctggccctgtgcatgctgccttgcgccctgctcccaggtgccactaacccgtaatctgctgctctgtgtgcatgtgctgcccggcagggctgtcgtgtgcgtgttgggtgggaaggcggaggcggcgcggggcgggctggcctctgagcatctggctgcatttagcacg

SEQ ID NO: 695 - DNA, 503 bp, Artificial Sequence
  Synthetic
gagcctcctgcccctcaccaggccctgttagcatcacctcgggcacctggccacagcaggggccagtcagggcaccccgggatagcacgcccaggccctgtgcaaggcctctggcacttaggagaggcttttgcccctttgtcctctgagcagaagggttggcaaagagggaaggggacaggccagttctgcacctggcctttctccagaatgaaggcctccacctcccgtccgcacccacagaaagaaaagtaaactgttttcgcggctgcgcagaaagaagaacatggtacgtgcagtgagtgctgcggaggggcgcagaggcccgcgccctggctggccctgtgcatgctgccttgcgccctgctcccaggtgctcactaacccgtaatctggctctgtgtgcagtgctgcccggcagggctgtcgtgtgcgtgttgggtgggaaggcggaggcggcgcggggcgggctggcctctgagcatctggctgcatttagcacg

SEQ ID NO: 696 - DNA, 504 bp, Artificial Sequence
  Synthetic
gagcctcctgcccctcaccaggccctgttagcatcacctcgggcacctggccacagcaggggccagtcagggcaccccgggatagcacgcccaggccctgtgcaaggcctctggcacttaggagaggcttttgcccctttgtcctctgagcagaagggttggcaaagagggaaggggacaggccagttctgcacctggcctttctccagaatgaaggcctccacctcccgtccgcacccacagaaagaaaagtaaactgttttcgcggctgcgcagaaagaagaacatggtacgtgcagtgagtgctgcggaggggcgcagaggcccgcgccctggctggccctgtgcatgctgccttgcgccctgctcccaggtgctcactaacccgtaatctggctctgtgtgcatgtgctgcccggcagggctgtcgtgtgcgtgttgggtgggaaggcggaggcggcgcggggcgggctggcctctgagcatctggctgcatttagcacg

SEQ ID NO: 697 - DNA, 505 bp, Artificial Sequence
  Synthetic
gagcctcctgcccctcaccaggccctgttagcatcacctcgggcacctggccacagcaggggccagtcagggcaccccgggatagcacgcccaggccctgtgcaaggcctctggcacttaggagaggcttttgcccctttgtcctctgagcagaagggttggcaaagagggaaggggacaggccagttctgcacctggcctttctccagaatgaaggcctccacctcccgtccgcacccacagaaagaaaagtaaactgttttcgcggctgcgcagaaagaagaacatggtacgtgcagtgagtgctgcggaggggcgcagaggcccgcgccctggctggccctgtgcatgctgccttgcgccctgctcccaggtgctcactaacccgtaatctgctgctctgtgtgcagtgctgcccggcagggctgtcgtgtgcgtgttgggtgggaaggcggaggcggcgcggggcgggctggcctctgagcatctggctgcatttagcacg

SEQ ID NO: 698 - DNA, 506 bp, Artificial Sequence
  Synthetic
gagcctcctgcccctcaccaggccctgttagcatcacctcgggcacctggccacagcaggggccagtcagggcaccccgggatagcacgcccaggccctgtgcaaggcctctggcacttaggagaggcttttgcccctttgtcctctgagcagaagggttggcaaagagggaaggggacaggccagttctgcacctggcctttctccagaatgaaggcctccacctcccgtccgcacccacagaaagaaaagtaaactgttttcgcggctgcgcagaaagaagaacatggtacgtgcagtgagtgctgcggaggggcgcagaggcccgcgccctggctggccctgtgcatgctgccttgcgccctgctcccaggtgctcactaacccgtaatctgctgctctgtgtgcatgtgctgcccggcagggctgtcgtgtgcgtgttgggtgggaaggcggaggcggcgcggggcgggctggcctctgagcatctggctgcatttagcacg

SEQ ID NO: 699 - DNA, 501 bp, Artificial Sequence
  Synthetic
gagcctcctgcccctcaccaggccctgttagcatcacctcgggcacctggccacagcaggggccagtcagggcaccccgggatagcacgcccaggccctgtgcaaggcctctggcacttaggagaggcttttgcccctttgtcctctgagcagaagggttggcaaagagggaaggggacaggccagttctgcacctggcctttctccagaatgaaggcctccacctcccgtccgcacccacagaaagaaaagtaaactgttttcgcggctgcgcagaaagaagaacatggtaagtgcagtgagtgctgcggaggggcgcagaggcccgcgccctggctggccctgtgcatgcgccttgcgccctgctcccaggtgccactaacccgtaatctggctctgtgtgcagtgctgcccggcagggctgtcgtgtgcgtgttgggtgggaaggcggaggcggcgcggggcgggctggcctctgagcatctggctgcatttagcacg

SEQ ID NO: 700 - DNA, 502 bp, Artificial Sequence
  Synthetic
gagcctcctgcccctcaccaggccctgttagcatcacctcgggcacctggccacagcaggggccagtcagggcaccccgggatagcacgcccaggccctgtgcaaggcctctggcacttaggagaggcttttgcccctttgtcctctgagcagaagggttggcaaagagggaaggggacaggccagttctgcacctggcctttctccagaatgaaggcctccacctcccgtccgcacccacagaaagaaaagtaaactgttttcgcggctgcgcagaaagaagaacatggtaagtgcagtgagtgctgcggaggggcgcagaggcccgcgccctggctggccctgtgcatgcgccttgcgccctgctcccaggtgccactaacccgtaatctggctctgtgtgcatgtgctgcccggcagggctgtcgtgtgcgtgttgggtgggaaggcggaggcggcgcggggcgggctggcctctgagcatctggctgcatttagcacg

SEQ ID NO: 701 - DNA, 503 bp, Artificial Sequence
  Synthetic
gagcctcctgcccctcaccaggccctgttagcatcacctcgggcacctggccacagcaggggccagtcagggcaccccgggatagcacgcccaggccctgtgcaaggcctctggcacttaggagaggcttttgcccctttgtcctctgagcagaagggttggcaaagagggaaggggacaggccagttctgcacctggcctttctccagaatgaaggcctccacctcccgtccgcacccacagaaagaaaagtaaactgttttcgcggctgcgcagaaagaagaacatggtaagtgcagtgagtgctgcggaggggcgcagaggcccgcgccctggctggccctgtgcatgcgccttgcgccctgctcccaggtgccactaacccgtaatctgctgctctgtgtgcagtgctgcccggcagggctgtcgtgtgcgtgttgggtgggaaggcggaggcggcgcggggcgggctggcctctgagcatctggctgcatttagcacg

SEQ ID NO: 702 - DNA, 504 bp, Artificial Sequence
  Synthetic
gagcctcctgcccctcaccaggccctgttagcatcacctcgggcacctggccacagcaggggccagtcagggcaccccgggatagcacgcccaggccctgtgcaaggcctctggcacttaggagaggcttttgcccctttgtcctctgagcagaagggttggcaaagagggaaggggacaggccagttctgcacctggcctttctccagaatgaaggcctccacctcccgtccgcacccacagaaagaaaagtaaactgttttcgcggctgcgcagaaagaagaacatggtaagtgcagtgagtgctgcggaggggcgcagaggcccgcgccctggctggccctgtgcatgcgccttgcgccctgctcccaggtgccactaacccgtaatctgctgctctgtgtgcatgtgctgcccggcagggctgtcgtgtgcgtgttgggtgggaaggcggaggcggcgcggggcgggctggcctctgagcatctggctgcatttagcacg

SEQ ID NO: 703 - DNA, 502 bp, Artificial Sequence
  Synthetic
gagcctcctgcccctcaccaggccctgttagcatcacctcgggcacctggccacagcaggggccagtcagggcaccccgggatagcacgcccaggccctgtgcaaggcctctggcacttaggagaggcttttgcccctttgtcctctgagcagaagggttggcaaagagggaaggggacaggccagttctgcacctggcctttctccagaatgaaggcctccacctcccgtccgcacccacagaaagaaaagtaaactgttttcgcggctgcgcagaaagaagaacatggtaagtgcagtgagtgctgcggaggggcgcagaggcccgcgccctggctggccctgtgcatgcgccttgcgccctgctcccaggtgctcactaacccgtaatctggctctgtgtgcagtgctgcccggcagggctgtcgtgtgcgtgttgggtgggaaggcggaggcggcgcggggcgggctggcctctgagcatctggctgcatttagcacg

SEQ ID NO: 704 - DNA, 503 bp, Artificial Sequence
  Synthetic
gagcctcctgcccctcaccaggccctgttagcatcacctcgggcacctggccacagcaggggccagtcagggcaccccgggatagcacgcccaggccctgtgcaaggcctctggcacttaggagaggcttttgcccctttgtcctctgagcagaagggttggcaaagagggaaggggacaggccagttctgcacctggcctttctccagaatgaaggcctccacctcccgtccgcacccacagaaagaaaagtaaactgttttcgcggctgcgcagaaagaagaacatggtaagtgcagtgagtgctgcggaggggcgcagaggcccgcgccctggctggccctgtgcatgcgccttgcgccctgctcccaggtgctcactaacccgtaatctggctctgtgtgcatgtgctgcccggcagggctgtcgtgtgcgtgttgggtgggaaggcggaggcggcgcggggcgggctggcctctgagcatctggctgcatttagcacg

SEQ ID NO: 705 - DNA, 504 bp, Artificial Sequence
  Synthetic
gagcctcctgcccctcaccaggccctgttagcatcacctcgggcacctggccacagcaggggccagtcagggcaccccgggatagcacgcccaggccctgtgcaaggcctctggcacttaggagaggcttttgcccctttgtcctctgagcagaagggttggcaaagagggaaggggacaggccagttctgcacctggcctttctccagaatgaaggcctccacctcccgtccgcacccacagaaagaaaagtaaactgttttcgcggctgcgcagaaagaagaacatggtaagtgcagtgagtgctgcggaggggcgcagaggcccgcgccctggctggccctgtgcatgcgccttgcgccctgctcccaggtgctcactaacccgtaatctgctgctctgtgtgcagtgctgcccggcagggctgtcgtgtgcgtgttgggtgggaaggcggaggcggcgcggggcgggctggcctctgagcatctggctgcatttagcacg

SEQ ID NO: 706 - DNA, 505 bp, Artificial Sequence
  Synthetic
gagcctcctgcccctcaccaggccctgttagcatcacctcgggcacctggccacagcaggggccagtcagggcaccccgggatagcacgcccaggccctgtgcaaggcctctggcacttaggagaggcttttgcccctttgtcctctgagcagaagggttggcaaagagggaaggggacaggccagttctgcacctggcctttctccagaatgaaggcctccacctcccgtccgcacccacagaaagaaaagtaaactgttttcgcggctgcgcagaaagaagaacatggtaagtgcagtgagtgctgcggaggggcgcagaggcccgcgccctggctggccctgtgcatgcgccttgcgccctgctcccaggtgctcactaacccgtaatctgctgctctgtgtgcatgtgctgcccggcagggctgtcgtgtgcgtgttgggtgggaaggcggaggcggcgcggggcgggctggcctctgagcatctggctgcatttagcacg

SEQ ID NO: 707 - DNA, 502 bp, Artificial Sequence
  Synthetic
gagcctcctgcccctcaccaggccctgttagcatcacctcgggcacctggccacagcaggggccagtcagggcaccccgggatagcacgcccaggccctgtgcaaggcctctggcacttaggagaggcttttgcccctttgtcctctgagcagaagggttggcaaagagggaaggggacaggccagttctgcacctggcctttctccagaatgaaggcctccacctcccgtccgcacccacagaaagaaaagtaaactgttttcgcggctgcgcagaaagaagaacatggtaagtgcagtgagtgctgcggaggggcgcagaggcccgcgccctggctggccctgtgcatgctgccttgcgccctgctcccaggtgccactaacccgtaatctggctctgtgtgcagtgctgcccggcagggctgtcgtgtgcgtgttgggtgggaaggcggaggcggcgcggggcgggctggcctctgagcatctggctgcatttagcacg

SEQ ID NO: 708 - DNA, 503 bp, Artificial Sequence
  Synthetic
gagcctcctgcccctcaccaggccctgttagcatcacctcgggcacctggccacagcaggggccagtcagggcaccccgggatagcacgcccaggccctgtgcaaggcctctggcacttaggagaggcttttgcccctttgtcctctgagcagaagggttggcaaagagggaaggggacaggccagttctgcacctggcctttctccagaatgaaggcctccacctcccgtccgcacccacagaaagaaaagtaaactgttttcgcggctgcgcagaaagaagaacatggtaagtgcagtgagtgctgcggaggggcgcagaggcccgcgccctggctggccctgtgcatgctgccttgcgccctgctcccaggtgccactaacccgtaatctggctctgtgtgcatgtgctgcccggcagggctgtcgtgtgcgtgttgggtgggaaggcggaggcggcgcggggcgggctggcctctgagcatctggctgcatttagcacg

SEQ ID NO: 709 - DNA, 504 bp, Artificial Sequence
  Synthetic
gagcctcctgcccctcaccaggccctgttagcatcacctcgggcacctggccacagcaggggccagtcagggcaccccgggatagcacgcccaggccctgtgcaaggcctctggcacttaggagaggcttttgcccctttgtcctctgagcagaagggttggcaaagagggaaggggacaggccagttctgcacctggcctttctccagaatgaaggcctccacctcccgtccgcacccacagaaagaaaagtaaactgttttcgcggctgcgcagaaagaagaacatggtaagtgcagtgagtgctgcggaggggcgcagaggcccgcgccctggctggccctgtgcatgctgccttgcgccctgctcccaggtgccactaacccgtaatctgctgctctgtgtgcagtgctgcccggcagggctgtcgtgtgcgtgttgggtgggaaggcggaggcggcgcggggcgggctggcctctgagcatctggctgcatttagcacg

SEQ ID NO: 710 - DNA, 505 bp, Artificial Sequence
  Synthetic
gagcctcctgcccctcaccaggccctgttagcatcacctcgggcacctggccacagcaggggccagtcagggcaccccgggatagcacgcccaggccctgtgcaaggcctctggcacttaggagaggcttttgcccctttgtcctctgagcagaagggttggcaaagagggaaggggacaggccagttctgcacctggcctttctccagaatgaaggcctccacctcccgtccgcacccacagaaagaaaagtaaactgttttcgcggctgcgcagaaagaagaacatggtaagtgcagtgagtgctgcggaggggcgcagaggcccgcgccctggctggccctgtgcatgctgccttgcgccctgctcccaggtgccactaacccgtaatctgctgctctgtgtgcatgtgctgcccggcagggctgtcgtgtgcgtgttgggtgggaaggcggaggcggcgcggggcgggctggcctctgagcatctggctgcatttagcacg

SEQ ID NO: 711 - DNA, 503 bp, Artificial Sequence
  Synthetic
gagcctcctgcccctcaccaggccctgttagcatcacctcgggcacctggccacagcaggggccagtcagggcaccccgggatagcacgcccaggccctgtgcaaggcctctggcacttaggagaggcttttgcccctttgtcctctgagcagaagggttggcaaagagggaaggggacaggccagttctgcacctggcctttctccagaatgaaggcctccacctcccgtccgcacccacagaaagaaaagtaaactgttttcgcggctgcgcagaaagaagaacatggtaagtgcagtgagtgctgcggaggggcgcagaggcccgcgccctggctggccctgtgcatgctgccttgcgccctgctcccaggtgctcactaacccgtaatctggctctgtgtgcagtgctgcccggcagggctgtcgtgtgcgtgttgggtgggaaggcggaggcggcgcggggcgggctggcctctgagcatctggctgcatttagcacg

SEQ ID NO: 712 - DNA, 504 bp, Artificial Sequence
  Synthetic
gagcctcctgcccctcaccaggccctgttagcatcacctcgggcacctggccacagcaggggccagtcagggcaccccgggatagcacgcccaggccctgtgcaaggcctctggcacttaggagaggcttttgcccctttgtcctctgagcagaagggttggcaaagagggaaggggacaggccagttctgcacctggcctttctccagaatgaaggcctccacctcccgtccgcacccacagaaagaaaagtaaactgttttcgcggctgcgcagaaagaagaacatggtaagtgcagtgagtgctgcggaggggcgcagaggcccgcgccctggctggccctgtgcatgctgccttgcgccctgctcccaggtgctcactaacccgtaatctggctctgtgtgcatgtgctgcccggcagggctgtcgtgtgcgtgttgggtgggaaggcggaggcggcgcggggcgggctggcctctgagcatctggctgcatttagcacg

SEQ ID NO: 713 - DNA, 505 bp, Artificial Sequence
  Synthetic
gagcctcctgcccctcaccaggccctgttagcatcacctcgggcacctggccacagcaggggccagtcagggcaccccgggatagcacgcccaggccctgtgcaaggcctctggcacttaggagaggcttttgcccctttgtcctctgagcagaagggttggcaaagagggaaggggacaggccagttctgcacctggcctttctccagaatgaaggcctccacctcccgtccgcacccacagaaagaaaagtaaactgttttcgcggctgcgcagaaagaagaacatggtaagtgcagtgagtgctgcggaggggcgcagaggcccgcgccctggctggccctgtgcatgctgccttgcgccctgctcccaggtgctcactaacccgtaatctgctgctctgtgtgcagtgctgcccggcagggctgtcgtgtgcgtgttgggtgggaaggcggaggcggcgcggggcgggctggcctctgagcatctggctgcatttagcacg

SEQ ID NO: 714 - DNA, 506 bp, Artificial Sequence
  Synthetic
gagcctcctgcccctcaccaggccctgttagcatcacctcgggcacctggccacagcaggggccagtcagggcaccccgggatagcacgcccaggccctgtgcaaggcctctggcacttaggagaggcttttgcccctttgtcctctgagcagaagggttggcaaagagggaaggggacaggccagttctgcacctggcctttctccagaatgaaggcctccacctcccgtccgcacccacagaaagaaaagtaaactgttttcgcggctgcgcagaaagaagaacatggtaagtgcagtgagtgctgcggaggggcgcagaggcccgcgccctggctggccctgtgcatgctgccttgcgccctgctcccaggtgctcactaacccgtaatctgctgctctgtgtgcatgtgctgcccggcagggctgtcgtgtgcgtgttgggtgggaaggcggaggcggcgcggggcgggctggcctctgagcatctggctgcatttagcacg

SEQ ID NO: 715 - DNA, 501 bp, Artificial Sequence
  Synthetic
gagcctcctgcccctcaccaggccctgttagcatcacctcgggcacctggccacagcaggggccagtcagggcaccccgggatagcacgcccaggccctgtgcaaggcctctggcacttaggagaggcttttgcccctttgtcctctgagcagaagggttggcaaagagggaaggggacaggccagttctgcacctggcctttctccagaatgaaggcctccacctcccgtccgcacccacagaaagaaaagtaaactgttttcgcggctgcgcagaaagaagaacatggtaggtgcagtgagtgctgcggaggggcgcagaggcccgcgccctggctggccctgtgcatgcgccttgcgccctgctcccaggtgccactaacccgtaatctggctctgtgtgcagtgctgcccggcagggctgtcgtgtgcgtgttgggtgggaaggcggaggcggcgcggggcgggctggcctctgagcatctggctgcatttagcacg

SEQ ID NO: 716 - DNA, 502 bp, Artificial Sequence
  Synthetic
gagcctcctgcccctcaccaggccctgttagcatcacctcgggcacctggccacagcaggggccagtcagggcaccccgggatagcacgcccaggccctgtgcaaggcctctggcacttaggagaggcttttgcccctttgtcctctgagcagaagggttggcaaagagggaaggggacaggccagttctgcacctggcctttctccagaatgaaggcctccacctcccgtccgcacccacagaaagaaaagtaaactgttttcgcggctgcgcagaaagaagaacatggtaggtgcagtgagtgctgcggaggggcgcagaggcccgcgccctggctggccctgtgcatgcgccttgcgccctgctcccaggtgccactaacccgtaatctggctctgtgtgcatgtgctgcccggcagggctgtcgtgtgcgtgttgggtgggaaggcggaggcggcgcggggcgggctggcctctgagcatctggctgcatttagcacg

SEQ ID NO: 717 - DNA, 503 bp, Artificial Sequence
  Synthetic
gagcctcctgcccctcaccaggccctgttagcatcacctcgggcacctggccacagcaggggccagtcagggcaccccgggatagcacgcccaggccctgtgcaaggcctctggcacttaggagaggcttttgcccctttgtcctctgagcagaagggttggcaaagagggaaggggacaggccagttctgcacctggcctttctccagaatgaaggcctccacctcccgtccgcacccacagaaagaaaagtaaactgttttcgcggctgcgcagaaagaagaacatggtaggtgcagtgagtgctgcggaggggcgcagaggcccgcgccctggctggccctgtgcatgcgccttgcgccctgctcccaggtgccactaacccgtaatctgctgctctgtgtgcagtgctgcccggcagggctgtcgtgtgcgtgttgggtgggaaggcggaggcggcgcggggcgggctggcctctgagcatctggctgcatttagcacg

SEQ ID NO: 718 - DNA, 504 bp, Artificial Sequence
  Synthetic
gagcctcctgcccctcaccaggccctgttagcatcacctcgggcacctggccacagcaggggccagtcagggcaccccgggatagcacgcccaggccctgtgcaaggcctctggcacttaggagaggcttttgcccctttgtcctctgagcagaagggttggcaaagagggaaggggacaggccagttctgcacctggcctttctccagaatgaaggcctccacctcccgtccgcacccacagaaagaaaagtaaactgttttcgcggctgcgcagaaagaagaacatggtaggtgcagtgagtgctgcggaggggcgcagaggcccgcgccctggctggccctgtgcatgcgccttgcgccctgctcccaggtgccactaacccgtaatctgctgctctgtgtgcatgtgctgcccggcagggctgtcgtgtgcgtgttgggtgggaaggcggaggcggcgcggggcgggctggcctctgagcatctggctgcatttagcacg

SEQ ID NO: 719 - DNA, 502 bp, Artificial Sequence
  Synthetic
gagcctcctgcccctcaccaggccctgttagcatcacctcgggcacctggccacagcaggggccagtcagggcaccccgggatagcacgcccaggccctgtgcaaggcctctggcacttaggagaggcttttgcccctttgtcctctgagcagaagggttggcaaagagggaaggggacaggccagttctgcacctggcctttctccagaatgaaggcctccacctcccgtccgcacccacagaaagaaaagtaaactgttttcgcggctgcgcagaaagaagaacatggtaggtgcagtgagtgctgcggaggggcgcagaggcccgcgccctggctggccctgtgcatgcgccttgcgccctgctcccaggtgctcactaacccgtaatctggctctgtgtgcagtgctgcccggcagggctgtcgtgtgcgtgttgggtgggaaggcggaggcggcgcggggcgggctggcctctgagcatctggctgcatttagcacg

SEQ ID NO: 720 - DNA, 503 bp, Artificial Sequence
  Synthetic
gagcctcctgcccctcaccaggccctgttagcatcacctcgggcacctggccacagcaggggccagtcagggcaccccgggatagcacgcccaggccctgtgcaaggcctctggcacttaggagaggcttttgcccctttgtcctctgagcagaagggttggcaaagagggaaggggacaggccagttctgcacctggcctttctccagaatgaaggcctccacctcccgtccgcacccacagaaagaaaagtaaactgttttcgcggctgcgcagaaagaagaacatggtaggtgcagtgagtgctgcggaggggcgcagaggcccgcgccctggctggccctgtgcatgcgccttgcgccctgctcccaggtgctcactaacccgtaatctggctctgtgtgcatgtgctgcccggcagggctgtcgtgtgcgtgttgggtgggaaggcggaggcggcgcggggcgggctggcctctgagcatctggctgcatttagcacg

SEQ ID NO: 721 - DNA, 504 bp, Artificial Sequence
  Synthetic
gagcctcctgcccctcaccaggccctgttagcatcacctcgggcacctggccacagcaggggccagtcagggcaccccgggatagcacgcccaggccctgtgcaaggcctctggcacttaggagaggcttttgcccctttgtcctctgagcagaagggttggcaaagagggaaggggacaggccagttctgcacctggcctttctccagaatgaaggcctccacctcccgtccgcacccacagaaagaaaagtaaactgttttcgcggctgcgcagaaagaagaacatggtaggtgcagtgagtgctgcggaggggcgcagaggcccgcgccctggctggccctgtgcatgcgccttgcgccctgctcccaggtgctcactaacccgtaatctgctgctctgtgtgcagtgctgcccggcagggctgtcgtgtgcgtgttgggtgggaaggcggaggcggcgcggggcgggctggcctctgagcatctggctgcatttagcacg

SEQ ID NO: 722 - DNA, 505 bp, Artificial Sequence
  Synthetic
gagcctcctgcccctcaccaggccctgttagcatcacctcgggcacctggccacagcaggggccagtcagggcaccccgggatagcacgcccaggccctgtgcaaggcctctggcacttaggagaggcttttgcccctttgtcctctgagcagaagggttggcaaagagggaaggggacaggccagttctgcacctggcctttctccagaatgaaggcctccacctcccgtccgcacccacagaaagaaaagtaaactgttttcgcggctgcgcagaaagaagaacatggtaggtgcagtgagtgctgcggaggggcgcagaggcccgcgccctggctggccctgtgcatgcgccttgcgccctgctcccaggtgctcactaacccgtaatctgctgctctgtgtgcatgtgctgcccggcagggctgtcgtgtgcgtgttgggtgggaaggcggaggcggcgcggggcgggctggcctctgagcatctggctgcatttagcacg

SEQ ID NO: 723 - DNA, 502 bp, Artificial Sequence
  Synthetic
gagcctcctgcccctcaccaggccctgttagcatcacctcgggcacctggccacagcaggggccagtcagggcaccccgggatagcacgcccaggccctgtgcaaggcctctggcacttaggagaggcttttgcccctttgtcctctgagcagaagggttggcaaagagggaaggggacaggccagttctgcacctggcctttctccagaatgaaggcctccacctcccgtccgcacccacagaaagaaaagtaaactgttttcgcggctgcgcagaaagaagaacatggtaggtgcagtgagtgctgcggaggggcgcagaggcccgcgccctggctggccctgtgcatgctgccttgcgccctgctcccaggtgccactaacccgtaatctggctctgtgtgcagtgctgcccggcagggctgtcgtgtgcgtgttgggtgggaaggcggaggcggcgcggggcgggctggcctctgagcatctggctgcatttagcacg

SEQ ID NO: 724 - DNA, 503 bp, Artificial Sequence
  Synthetic
gagcctcctgcccctcaccaggccctgttagcatcacctcgggcacctggccacagcaggggccagtcagggcaccccgggatagcacgcccaggccctgtgcaaggcctctggcacttaggagaggcttttgcccctttgtcctctgagcagaagggttggcaaagagggaaggggacaggccagttctgcacctggcctttctccagaatgaaggcctccacctcccgtccgcacccacagaaagaaaagtaaactgttttcgcggctgcgcagaaagaagaacatggtaggtgcagtgagtgctgcggaggggcgcagaggcccgcgccctggctggccctgtgcatgctgccttgcgccctgctcccaggtgccactaacccgtaatctggctctgtgtgcatgtgctgcccggcagggctgtcgtgtgcgtgttgggtgggaaggcggaggcggcgcggggcgggctggcctctgagcatctggctgcatttagcacg

SEQ ID NO: 725 - DNA, 504 bp, Artificial Sequence
  Synthetic
gagcctcctgcccctcaccaggccctgttagcatcacctcgggcacctggccacagcaggggccagtcagggcaccccgggatagcacgcccaggccctgtgcaaggcctctggcacttaggagaggcttttgcccctttgtcctctgagcagaagggttggcaaagagggaaggggacaggccagttctgcacctggcctttctccagaatgaaggcctccacctcccgtccgcacccacagaaagaaaagtaaactgttttcgcggctgcgcagaaagaagaacatggtaggtgcagtgagtgctgcggaggggcgcagaggcccgcgccctggctggccctgtgcatgctgccttgcgccctgctcccaggtgccactaacccgtaatctgctgctctgtgtgcagtgctgcccggcagggctgtcgtgtgcgtgttgggtgggaaggcggaggcggcgcggggcgggctggcctctgagcatctggctgcatttagcacg

SEQ ID NO: 726 - DNA, 505 bp, Artificial Sequence
  Synthetic
gagcctcctgcccctcaccaggccctgttagcatcacctcgggcacctggccacagcaggggccagtcagggcaccccgggatagcacgcccaggccctgtgcaaggcctctggcacttaggagaggcttttgcccctttgtcctctgagcagaagggttggcaaagagggaaggggacaggccagttctgcacctggcctttctccagaatgaaggcctccacctcccgtccgcacccacagaaagaaaagtaaactgttttcgcggctgcgcagaaagaagaacatggtaggtgcagtgagtgctgcggaggggcgcagaggcccgcgccctggctggccctgtgcatgctgccttgcgccctgctcccaggtgccactaacccgtaatctgctgctctgtgtgcatgtgctgcccggcagggctgtcgtgtgcgtgttgggtgggaaggcggaggcggcgcggggcgggctggcctctgagcatctggctgcatttagcacg

SEQ ID NO: 727 - DNA, 503 bp, Artificial Sequence
  Synthetic
gagcctcctgcccctcaccaggccctgttagcatcacctcgggcacctggccacagcaggggccagtcagggcaccccgggatagcacgcccaggccctgtgcaaggcctctggcacttaggagaggcttttgcccctttgtcctctgagcagaagggttggcaaagagggaaggggacaggccagttctgcacctggcctttctccagaatgaaggcctccacctcccgtccgcacccacagaaagaaaagtaaactgttttcgcggctgcgcagaaagaagaacatggtaggtgcagtgagtgctgcggaggggcgcagaggcccgcgccctggctggccctgtgcatgctgccttgcgccctgctcccaggtgctcactaacccgtaatctggctctgtgtgcagtgctgcccggcagggctgtcgtgtgcgtgttgggtgggaaggcggaggcggcgcggggcgggctggcctctgagcatctggctgcatttagcacg

SEQ ID NO: 728 - DNA, 504 bp, Artificial Sequence
  Synthetic
gagcctcctgcccctcaccaggccctgttagcatcacctcgggcacctggccacagcaggggccagtcagggcaccccgggatagcacgcccaggccctgtgcaaggcctctggcacttaggagaggcttttgcccctttgtcctctgagcagaagggttggcaaagagggaaggggacaggccagttctgcacctggcctttctccagaatgaaggcctccacctcccgtccgcacccacagaaagaaaagtaaactgttttcgcggctgcgcagaaagaagaacatggtaggtgcagtgagtgctgcggaggggcgcagaggcccgcgccctggctggccctgtgcatgctgccttgcgccctgctcccaggtgctcactaacccgtaatctggctctgtgtgcatgtgctgcccggcagggctgtcgtgtgcgtgttgggtgggaaggcggaggcggcgcggggcgggctggcctctgagcatctggctgcatttagcacg

SEQ ID NO: 729 - DNA, 505 bp, Artificial Sequence
  Synthetic
gagcctcctgcccctcaccaggccctgttagcatcacctcgggcacctggccacagcaggggccagtcagggcaccccgggatagcacgcccaggccctgtgcaaggcctctggcacttaggagaggcttttgcccctttgtcctctgagcagaagggttggcaaagagggaaggggacaggccagttctgcacctggcctttctccagaatgaaggcctccacctcccgtccgcacccacagaaagaaaagtaaactgttttcgcggctgcgcagaaagaagaacatggtaggtgcagtgagtgctgcggaggggcgcagaggcccgcgccctggctggccctgtgcatgctgccttgcgccctgctcccaggtgctcactaacccgtaatctgctgctctgtgtgcagtgctgcccggcagggctgtcgtgtgcgtgttgggtgggaaggcggaggcggcgcggggcgggctggcctctgagcatctggctgcatttagcacg

SEQ ID NO: 730 - DNA, 506 bp, Artificial Sequence
  Synthetic
gagcctcctgcccctcaccaggccctgttagcatcacctcgggcacctggccacagcaggggccagtcagggcaccccgggatagcacgcccaggccctgtgcaaggcctctggcacttaggagaggcttttgcccctttgtcctctgagcagaagggttggcaaagagggaaggggacaggccagttctgcacctggcctttctccagaatgaaggcctccacctcccgtccgcacccacagaaagaaaagtaaactgttttcgcggctgcgcagaaagaagaacatggtaggtgcagtgagtgctgcggaggggcgcagaggcccgcgccctggctggccctgtgcatgctgccttgcgccctgctcccaggtgctcactaacccgtaatctgctgctctgtgtgcatgtgctgcccggcagggctgtcgtgtgcgtgttgggtgggaaggcggaggcggcgcggggcgggctggcctctgagcatctggctgcatttagcacg

SEQ ID NO: 731 - DNA, 501 bp, Artificial Sequence
  Synthetic
gagcctcctgcccctcaccaggccctgttagcatcacctcgggcacctggccacagcaggggccagtcagggcaccccgggatagcacgcccaggccctgtgcaaggcctctggcacttaggagaggcttttgcccctttgtcctctgagcagaagggttggcaaagagggaaggggacaggccagttctgcacctggcctttctccagaatgaaggcctccacctcccgtccgcacccacagaaagaaaagtaaactgttttcgcggctgcgcagaaagaagaacatggtatgtgcagtgagtgctgcggaggggcgcagaggcccgcgccctggctggccctgtgcatgcgccttgcgccctgctcccaggtgccactaacccgtaatctggctctgtgtgcagtgctgcccggcagggctgtcgtgtgcgtgttgggtgggaaggcggaggcggcgcggggcgggctggcctctgagcatctggctgcatttagcacg

SEQ ID NO: 732 - DNA, 502 bp, Artificial Sequence
  Synthetic
gagcctcctgcccctcaccaggccctgttagcatcacctcgggcacctggccacagcaggggccagtcagggcaccccgggatagcacgcccaggccctgtgcaaggcctctggcacttaggagaggcttttgcccctttgtcctctgagcagaagggttggcaaagagggaaggggacaggccagttctgcacctggcctttctccagaatgaaggcctccacctcccgtccgcacccacagaaagaaaagtaaactgttttcgcggctgcgcagaaagaagaacatggtatgtgcagtgagtgctgcggaggggcgcagaggcccgcgccctggctggccctgtgcatgcgccttgcgccctgctcccaggtgccactaacccgtaatctggctctgtgtgcatgtgctgcccggcagggctgtcgtgtgcgtgttgggtgggaaggcggaggcggcgcggggcgggctggcctctgagcatctggctgcatttagcacg

SEQ ID NO: 733 - DNA, 503 bp, Artificial Sequence
  Synthetic
gagcctcctgcccctcaccaggccctgttagcatcacctcgggcacctggccacagcaggggccagtcagggcaccccgggatagcacgcccaggccctgtgcaaggcctctggcacttaggagaggcttttgcccctttgtcctctgagcagaagggttggcaaagagggaaggggacaggccagttctgcacctggcctttctccagaatgaaggcctccacctcccgtccgcacccacagaaagaaaagtaaactgttttcgcggctgcgcagaaagaagaacatggtatgtgcagtgagtgctgcggaggggcgcagaggcccgcgccctggctggccctgtgcatgcgccttgcgccctgctcccaggtgccactaacccgtaatctgctgctctgtgtgcagtgctgcccggcagggctgtcgtgtgcgtgttgggtgggaaggcggaggcggcgcggggcgggctggcctctgagcatctggctgcatttagcacg

SEQ ID NO: 734 - DNA, 504 bp, Artificial Sequence
  Synthetic
gagcctcctgcccctcaccaggccctgttagcatcacctcgggcacctggccacagcaggggccagtcagggcaccccgggatagcacgcccaggccctgtgcaaggcctctggcacttaggagaggcttttgcccctttgtcctctgagcagaagggttggcaaagagggaaggggacaggccagttctgcacctggcctttctccagaatgaaggcctccacctcccgtccgcacccacagaaagaaaagtaaactgttttcgcggctgcgcagaaagaagaacatggtatgtgcagtgagtgctgcggaggggcgcagaggcccgcgccctggctggccctgtgcatgcgccttgcgccctgctcccaggtgccactaacccgtaatctgctgctctgtgtgcatgtgctgcccggcagggctgtcgtgtgcgtgttgggtgggaaggcggaggcggcgcggggcgggctggcctctgagcatctggctgcatttagcacg

SEQ ID NO: 735 - DNA, 502 bp, Artificial Sequence
  Synthetic
gagcctcctgcccctcaccaggccctgttagcatcacctcgggcacctggccacagcaggggccagtcagggcaccccgggatagcacgcccaggccctgtgcaaggcctctggcacttaggagaggcttttgcccctttgtcctctgagcagaagggttggcaaagagggaaggggacaggccagttctgcacctggcctttctccagaatgaaggcctccacctcccgtccgcacccacagaaagaaaagtaaactgttttcgcggctgcgcagaaagaagaacatggtatgtgcagtgagtgctgcggaggggcgcagaggcccgcgccctggctggccctgtgcatgcgccttgcgccctgctcccaggtgctcactaacccgtaatctggctctgtgtgcagtgctgcccggcagggctgtcgtgtgcgtgttgggtgggaaggcggaggcggcgcggggcgggctggcctctgagcatctggctgcatttagcacg

SEQ ID NO: 736 - DNA, 503 bp, Artificial Sequence
  Synthetic
gagcctcctgcccctcaccaggccctgttagcatcacctcgggcacctggccacagcaggggccagtcagggcaccccgggatagcacgcccaggccctgtgcaaggcctctggcacttaggagaggcttttgcccctttgtcctctgagcagaagggttggcaaagagggaaggggacaggccagttctgcacctggcctttctccagaatgaaggcctccacctcccgtccgcacccacagaaagaaaagtaaactgttttcgcggctgcgcagaaagaagaacatggtatgtgcagtgagtgctgcggaggggcgcagaggcccgcgccctggctggccctgtgcatgcgccttgcgccctgctcccaggtgctcactaacccgtaatctggctctgtgtgcatgtgctgcccggcagggctgtcgtgtgcgtgttgggtgggaaggcggaggcggcgcggggcgggctggcctctgagcatctggctgcatttagcacg

SEQ ID NO: 737 - DNA, 504 bp, Artificial Sequence
  Synthetic
gagcctcctgcccctcaccaggccctgttagcatcacctcgggcacctggccacagcaggggccagtcagggcaccccgggatagcacgcccaggccctgtgcaaggcctctggcacttaggagaggcttttgcccctttgtcctctgagcagaagggttggcaaagagggaaggggacaggccagttctgcacctggcctttctccagaatgaaggcctccacctcccgtccgcacccacagaaagaaaagtaaactgttttcgcggctgcgcagaaagaagaacatggtatgtgcagtgagtgctgcggaggggcgcagaggcccgcgccctggctggccctgtgcatgcgccttgcgccctgctcccaggtgctcactaacccgtaatctgctgctctgtgtgcagtgctgcccggcagggctgtcgtgtgcgtgttgggtgggaaggcggaggcggcgcggggcgggctggcctctgagcatctggctgcatttagcacg

SEQ ID NO: 738 - DNA, 505 bp, Artificial Sequence
  Synthetic
gagcctcctgcccctcaccaggccctgttagcatcacctcgggcacctggccacagcaggggccagtcagggcaccccgggatagcacgcccaggccctgtgcaaggcctctggcacttaggagaggcttttgcccctttgtcctctgagcagaagggttggcaaagagggaaggggacaggccagttctgcacctggcctttctccagaatgaaggcctccacctcccgtccgcacccacagaaagaaaagtaaactgttttcgcggctgcgcagaaagaagaacatggtatgtgcagtgagtgctgcggaggggcgcagaggcccgcgccctggctggccctgtgcatgcgccttgcgccctgctcccaggtgctcactaacccgtaatctgctgctctgtgtgcatgtgctgcccggcagggctgtcgtgtgcgtgttgggtgggaaggcggaggcggcgcggggcgggctggcctctgagcatctggctgcatttagcacg

SEQ ID NO: 739 - DNA, 502 bp, Artificial Sequence
  Synthetic
gagcctcctgcccctcaccaggccctgttagcatcacctcgggcacctggccacagcaggggccagtcagggcaccccgggatagcacgcccaggccctgtgcaaggcctctggcacttaggagaggcttttgcccctttgtcctctgagcagaagggttggcaaagagggaaggggacaggccagttctgcacctggcctttctccagaatgaaggcctccacctcccgtccgcacccacagaaagaaaagtaaactgttttcgcggctgcgcagaaagaagaacatggtatgtgcagtgagtgctgcggaggggcgcagaggcccgcgccctggctggccctgtgcatgctgccttgcgccctgctcccaggtgccactaacccgtaatctggctctgtgtgcagtgctgcccggcagggctgtcgtgtgcgtgttgggtgggaaggcggaggcggcgcggggcgggctggcctctgagcatctggctgcatttagcacg

SEQ ID NO: 740 - DNA, 503 bp, Artificial Sequence
  Synthetic
gagcctcctgcccctcaccaggccctgttagcatcacctcgggcacctggccacagcaggggccagtcagggcaccccgggatagcacgcccaggccctgtgcaaggcctctggcacttaggagaggcttttgcccctttgtcctctgagcagaagggttggcaaagagggaaggggacaggccagttctgcacctggcctttctccagaatgaaggcctccacctcccgtccgcacccacagaaagaaaagtaaactgttttcgcggctgcgcagaaagaagaacatggtatgtgcagtgagtgctgcggaggggcgcagaggcccgcgccctggctggccctgtgcatgctgccttgcgccctgctcccaggtgccactaacccgtaatctggctctgtgtgcatgtgctgcccggcagggctgtcgtgtgcgtgttgggtgggaaggcggaggcggcgcggggcgggctggcctctgagcatctggctgcatttagcacg

SEQ ID NO: 741 - DNA, 504 bp, Artificial Sequence
  Synthetic
gagcctcctgcccctcaccaggccctgttagcatcacctcgggcacctggccacagcaggggccagtcagggcaccccgggatagcacgcccaggccctgtgcaaggcctctggcacttaggagaggcttttgcccctttgtcctctgagcagaagggttggcaaagagggaaggggacaggccagttctgcacctggcctttctccagaatgaaggcctccacctcccgtccgcacccacagaaagaaaagtaaactgttttcgcggctgcgcagaaagaagaacatggtatgtgcagtgagtgctgcggaggggcgcagaggcccgcgccctggctggccctgtgcatgctgccttgcgccctgctcccaggtgccactaacccgtaatctgctgctctgtgtgcagtgctgcccggcagggctgtcgtgtgcgtgttgggtgggaaggcggaggcggcgcggggcgggctggcctctgagcatctggctgcatttagcacg

SEQ ID NO: 742 - DNA, 505 bp, Artificial Sequence
  Synthetic
gagcctcctgcccctcaccaggccctgttagcatcacctcgggcacctggccacagcaggggccagtcagggcaccccgggatagcacgcccaggccctgtgcaaggcctctggcacttaggagaggcttttgcccctttgtcctctgagcagaagggttggcaaagagggaaggggacaggccagttctgcacctggcctttctccagaatgaaggcctccacctcccgtccgcacccacagaaagaaaagtaaactgttttcgcggctgcgcagaaagaagaacatggtatgtgcagtgagtgctgcggaggggcgcagaggcccgcgccctggctggccctgtgcatgctgccttgcgccctgctcccaggtgccactaacccgtaatctgctgctctgtgtgcatgtgctgcccggcagggctgtcgtgtgcgtgttgggtgggaaggcggaggcggcgcggggcgggctggcctctgagcatctggctgcatttagcacg

SEQ ID NO: 743 - DNA, 503 bp, Artificial Sequence
  Synthetic
gagcctcctgcccctcaccaggccctgttagcatcacctcgggcacctggccacagcaggggccagtcagggcaccccgggatagcacgcccaggccctgtgcaaggcctctggcacttaggagaggcttttgcccctttgtcctctgagcagaagggttggcaaagagggaaggggacaggccagttctgcacctggcctttctccagaatgaaggcctccacctcccgtccgcacccacagaaagaaaagtaaactgttttcgcggctgcgcagaaagaagaacatggtatgtgcagtgagtgctgcggaggggcgcagaggcccgcgccctggctggccctgtgcatgctgccttgcgccctgctcccaggtgctcactaacccgtaatctggctctgtgtgcagtgctgcccggcagggctgtcgtgtgcgtgttgggtgggaaggcggaggcggcgcggggcgggctggcctctgagcatctggctgcatttagcacg

SEQ ID NO: 744 - DNA, 504 bp, Artificial Sequence
  Synthetic
gagcctcctgcccctcaccaggccctgttagcatcacctcgggcacctggccacagcaggggccagtcagggcaccccgggatagcacgcccaggccctgtgcaaggcctctggcacttaggagaggcttttgcccctttgtcctctgagcagaagggttggcaaagagggaaggggacaggccagttctgcacctggcctttctccagaatgaaggcctccacctcccgtccgcacccacagaaagaaaagtaaactgttttcgcggctgcgcagaaagaagaacatggtatgtgcagtgagtgctgcggaggggcgcagaggcccgcgccctggctggccctgtgcatgctgccttgcgccctgctcccaggtgctcactaacccgtaatctggctctgtgtgcatgtgctgcccggcagggctgtcgtgtgcgtgttgggtgggaaggcggaggcggcgcggggcgggctggcctctgagcatctggctgcatttagcacg

SEQ ID NO: 745 - DNA, 505 bp, Artificial Sequence
  Synthetic
gagcctcctgcccctcaccaggccctgttagcatcacctcgggcacctggccacagcaggggccagtcagggcaccccgggatagcacgcccaggccctgtgcaaggcctctggcacttaggagaggcttttgcccctttgtcctctgagcagaagggttggcaaagagggaaggggacaggccagttctgcacctggcctttctccagaatgaaggcctccacctcccgtccgcacccacagaaagaaaagtaaactgttttcgcggctgcgcagaaagaagaacatggtatgtgcagtgagtgctgcggaggggcgcagaggcccgcgccctggctggccctgtgcatgctgccttgcgccctgctcccaggtgctcactaacccgtaatctgctgctctgtgtgcagtgctgcccggcagggctgtcgtgtgcgtgttgggtgggaaggcggaggcggcgcggggcgggctggcctctgagcatctggctgcatttagcacg

SEQ ID NO: 746 - DNA, 506 bp, Artificial Sequence
  Synthetic
gagcctcctgcccctcaccaggccctgttagcatcacctcgggcacctggccacagcaggggccagtcagggcaccccgggatagcacgcccaggccctgtgcaaggcctctggcacttaggagaggcttttgcccctttgtcctctgagcagaagggttggcaaagagggaaggggacaggccagttctgcacctggcctttctccagaatgaaggcctccacctcccgtccgcacccacagaaagaaaagtaaactgttttcgcggctgcgcagaaagaagaacatggtatgtgcagtgagtgctgcggaggggcgcagaggcccgcgccctggctggccctgtgcatgctgccttgcgccctgctcccaggtgctcactaacccgtaatctgctgctctgtgtgcatgtgctgcccggcagggctgtcgtgtgcgtgttgggtgggaaggcggaggcggcgcggggcgggctggcctctgagcatctggctgcatttagcacg

SEQ ID NO: 747 - DNA, 501 bp, Artificial Sequence
  Synthetic
gagcctcctgcccctcaccaggccctgttagcatcacctcgggcacctggccacagcaggggccagtcagggcaccccgggatagcacgcccaggccctgtgcaaggcctctggcacttaggagaggcttttgcccctttgtcctctgagcagaagggttggcaaagagggaaggggacaggccagttctgcacctggcctttctccagaatgaaggcctccacctcccgtccgcacccacagaaagaaaagtaaactgttttcgcggctgcgcagaaagaagaacatggtacgagcagtgagtgctgcggaggggcgcagaggcccgcgccctggctggccctgtgcatgcgccttgcgccctgctcccaggtgccactaacccgtaatctggctctgtgtgcagtgctgcccggcagggctgtcgtgtgcgtgttgggtgggaaggcggaggcggcgcggggcgggctggcctctgagcatctggctgcatttagcacg

SEQ ID NO: 748 - DNA, 502 bp, Artificial Sequence
  Synthetic
gagcctcctgcccctcaccaggccctgttagcatcacctcgggcacctggccacagcaggggccagtcagggcaccccgggatagcacgcccaggccctgtgcaaggcctctggcacttaggagaggcttttgcccctttgtcctctgagcagaagggttggcaaagagggaaggggacaggccagttctgcacctggcctttctccagaatgaaggcctccacctcccgtccgcacccacagaaagaaaagtaaactgttttcgcggctgcgcagaaagaagaacatggtacgagcagtgagtgctgcggaggggcgcagaggcccgcgccctggctggccctgtgcatgcgccttgcgccctgctcccaggtgccactaacccgtaatctggctctgtgtgcatgtgctgcccggcagggctgtcgtgtgcgtgttgggtgggaaggcggaggcggcgcggggcgggctggcctctgagcatctggctgcatttagcacg

SEQ ID NO: 749 - DNA, 503 bp, Artificial Sequence
  Synthetic
gagcctcctgcccctcaccaggccctgttagcatcacctcgggcacctggccacagcaggggccagtcagggcaccccgggatagcacgcccaggccctgtgcaaggcctctggcacttaggagaggcttttgcccctttgtcctctgagcagaagggttggcaaagagggaaggggacaggccagttctgcacctggcctttctccagaatgaaggcctccacctcccgtccgcacccacagaaagaaaagtaaactgttttcgcggctgcgcagaaagaagaacatggtacgagcagtgagtgctgcggaggggcgcagaggcccgcgccctggctggccctgtgcatgcgccttgcgccctgctcccaggtgccactaacccgtaatctgctgctctgtgtgcagtgctgcccggcagggctgtcgtgtgcgtgttgggtgggaaggcggaggcggcgcggggcgggctggcctctgagcatctggctgcatttagcacg

SEQ ID NO: 750 - DNA, 504 bp, Artificial Sequence
  Synthetic
gagcctcctgcccctcaccaggccctgttagcatcacctcgggcacctggccacagcaggggccagtcagggcaccccgggatagcacgcccaggccctgtgcaaggcctctggcacttaggagaggcttttgcccctttgtcctctgagcagaagggttggcaaagagggaaggggacaggccagttctgcacctggcctttctccagaatgaaggcctccacctcccgtccgcacccacagaaagaaaagtaaactgttttcgcggctgcgcagaaagaagaacatggtacgagcagtgagtgctgcggaggggcgcagaggcccgcgccctggctggccctgtgcatgcgccttgcgccctgctcccaggtgccactaacccgtaatctgctgctctgtgtgcatgtgctgcccggcagggctgtcgtgtgcgtgttgggtgggaaggcggaggcggcgcggggcgggctggcctctgagcatctggctgcatttagcacg

SEQ ID NO: 751 - DNA, 502 bp, Artificial Sequence
  Synthetic
gagcctcctgcccctcaccaggccctgttagcatcacctcgggcacctggccacagcaggggccagtcagggcaccccgggatagcacgcccaggccctgtgcaaggcctctggcacttaggagaggcttttgcccctttgtcctctgagcagaagggttggcaaagagggaaggggacaggccagttctgcacctggcctttctccagaatgaaggcctccacctcccgtccgcacccacagaaagaaaagtaaactgttttcgcggctgcgcagaaagaagaacatggtacgagcagtgagtgctgcggaggggcgcagaggcccgcgccctggctggccctgtgcatgcgccttgcgccctgctcccaggtgctcactaacccgtaatctggctctgtgtgcagtgctgcccggcagggctgtcgtgtgcgtgttgggtgggaaggcggaggcggcgcggggcgggctggcctctgagcatctggctgcatttagcacg

SEQ ID NO: 752 - DNA, 503 bp, Artificial Sequence
  Synthetic
gagcctcctgcccctcaccaggccctgttagcatcacctcgggcacctggccacagcaggggccagtcagggcaccccgggatagcacgcccaggccctgtgcaaggcctctggcacttaggagaggcttttgcccctttgtcctctgagcagaagggttggcaaagagggaaggggacaggccagttctgcacctggcctttctccagaatgaaggcctccacctcccgtccgcacccacagaaagaaaagtaaactgttttcgcggctgcgcagaaagaagaacatggtacgagcagtgagtgctgcggaggggcgcagaggcccgcgccctggctggccctgtgcatgcgccttgcgccctgctcccaggtgctcactaacccgtaatctggctctgtgtgcatgtgctgcccggcagggctgtcgtgtgcgtgttgggtgggaaggcggaggcggcgcggggcgggctggcctctgagcatctggctgcatttagcacg

SEQ ID NO: 753 - DNA, 504 bp, Artificial Sequence
  Synthetic
gagcctcctgcccctcaccaggccctgttagcatcacctcgggcacctggccacagcaggggccagtcagggcaccccgggatagcacgcccaggccctgtgcaaggcctctggcacttaggagaggcttttgcccctttgtcctctgagcagaagggttggcaaagagggaaggggacaggccagttctgcacctggcctttctccagaatgaaggcctccacctcccgtccgcacccacagaaagaaaagtaaactgttttcgcggctgcgcagaaagaagaacatggtacgagcagtgagtgctgcggaggggcgcagaggcccgcgccctggctggccctgtgcatgcgccttgcgccctgctcccaggtgctcactaacccgtaatctgctgctctgtgtgcagtgctgcccggcagggctgtcgtgtgcgtgttgggtgggaaggcggaggcggcgcggggcgggctggcctctgagcatctggctgcatttagcacg

SEQ ID NO: 754 - DNA, 505 bp, Artificial Sequence
  Synthetic
gagcctcctgcccctcaccaggccctgttagcatcacctcgggcacctggccacagcaggggccagtcagggcaccccgggatagcacgcccaggccctgtgcaaggcctctggcacttaggagaggcttttgcccctttgtcctctgagcagaagggttggcaaagagggaaggggacaggccagttctgcacctggcctttctccagaatgaaggcctccacctcccgtccgcacccacagaaagaaaagtaaactgttttcgcggctgcgcagaaagaagaacatggtacgagcagtgagtgctgcggaggggcgcagaggcccgcgccctggctggccctgtgcatgcgccttgcgccctgctcccaggtgctcactaacccgtaatctgctgctctgtgtgcatgtgctgcccggcagggctgtcgtgtgcgtgttgggtgggaaggcggaggcggcgcggggcgggctggcctctgagcatctggctgcatttagcacg

SEQ ID NO: 755 - DNA, 502 bp, Artificial Sequence
  Synthetic
gagcctcctgcccctcaccaggccctgttagcatcacctcgggcacctggccacagcaggggccagtcagggcaccccgggatagcacgcccaggccctgtgcaaggcctctggcacttaggagaggcttttgcccctttgtcctctgagcagaagggttggcaaagagggaaggggacaggccagttctgcacctggcctttctccagaatgaaggcctccacctcccgtccgcacccacagaaagaaaagtaaactgttttcgcggctgcgcagaaagaagaacatggtacgagcagtgagtgctgcggaggggcgcagaggcccgcgccctggctggccctgtgcatgctgccttgcgccctgctcccaggtgccactaacccgtaatctggctctgtgtgcagtgctgcccggcagggctgtcgtgtgcgtgttgggtgggaaggcggaggcggcgcggggcgggctggcctctgagcatctggctgcatttagcacg

SEQ ID NO: 756 - DNA, 503 bp, Artificial Sequence
  Synthetic
gagcctcctgcccctcaccaggccctgttagcatcacctcgggcacctggccacagcaggggccagtcagggcaccccgggatagcacgcccaggccctgtgcaaggcctctggcacttaggagaggcttttgcccctttgtcctctgagcagaagggttggcaaagagggaaggggacaggccagttctgcacctggcctttctccagaatgaaggcctccacctcccgtccgcacccacagaaagaaaagtaaactgttttcgcggctgcgcagaaagaagaacatggtacgagcagtgagtgctgcggaggggcgcagaggcccgcgccctggctggccctgtgcatgctgccttgcgccctgctcccaggtgccactaacccgtaatctggctctgtgtgcatgtgctgcccggcagggctgtcgtgtgcgtgttgggtgggaaggcggaggcggcgcggggcgggctggcctctgagcatctggctgcatttagcacg

SEQ ID NO: 757 - DNA, 504 bp, Artificial Sequence
  Synthetic
gagcctcctgcccctcaccaggccctgttagcatcacctcgggcacctggccacagcaggggccagtcagggcaccccgggatagcacgcccaggccctgtgcaaggcctctggcacttaggagaggcttttgcccctttgtcctctgagcagaagggttggcaaagagggaaggggacaggccagttctgcacctggcctttctccagaatgaaggcctccacctcccgtccgcacccacagaaagaaaagtaaactgttttcgcggctgcgcagaaagaagaacatggtacgagcagtgagtgctgcggaggggcgcagaggcccgcgccctggctggccctgtgcatgctgccttgcgccctgctcccaggtgccactaacccgtaatctgctgctctgtgtgcagtgctgcccggcagggctgtcgtgtgcgtgttgggtgggaaggcggaggcggcgcggggcgggctggcctctgagcatctggctgcatttagcacg

SEQ ID NO: 758 - DNA, 505 bp, Artificial Sequence
  Synthetic
gagcctcctgcccctcaccaggccctgttagcatcacctcgggcacctggccacagcaggggccagtcagggcaccccgggatagcacgcccaggccctgtgcaaggcctctggcacttaggagaggcttttgcccctttgtcctctgagcagaagggttggcaaagagggaaggggacaggccagttctgcacctggcctttctccagaatgaaggcctccacctcccgtccgcacccacagaaagaaaagtaaactgttttcgcggctgcgcagaaagaagaacatggtacgagcagtgagtgctgcggaggggcgcagaggcccgcgccctggctggccctgtgcatgctgccttgcgccctgctcccaggtgccactaacccgtaatctgctgctctgtgtgcatgtgctgcccggcagggctgtcgtgtgcgtgttgggtgggaaggcggaggcggcgcggggcgggctggcctctgagcatctggctgcatttagcacg

SEQ ID NO: 759 - DNA, 503 bp, Artificial Sequence
  Synthetic
gagcctcctgcccctcaccaggccctgttagcatcacctcgggcacctggccacagcaggggccagtcagggcaccccgggatagcacgcccaggccctgtgcaaggcctctggcacttaggagaggcttttgcccctttgtcctctgagcagaagggttggcaaagagggaaggggacaggccagttctgcacctggcctttctccagaatgaaggcctccacctcccgtccgcacccacagaaagaaaagtaaactgttttcgcggctgcgcagaaagaagaacatggtacgagcagtgagtgctgcggaggggcgcagaggcccgcgccctggctggccctgtgcatgctgccttgcgccctgctcccaggtgctcactaacccgtaatctggctctgtgtgcagtgctgcccggcagggctgtcgtgtgcgtgttgggtgggaaggcggaggcggcgcggggcgggctggcctctgagcatctggctgcatttagcacg

SEQ ID NO: 760 - DNA, 504 bp, Artificial Sequence
  Synthetic
gagcctcctgcccctcaccaggccctgttagcatcacctcgggcacctggccacagcaggggccagtcagggcaccccgggatagcacgcccaggccctgtgcaaggcctctggcacttaggagaggcttttgcccctttgtcctctgagcagaagggttggcaaagagggaaggggacaggccagttctgcacctggcctttctccagaatgaaggcctccacctcccgtccgcacccacagaaagaaaagtaaactgttttcgcggctgcgcagaaagaagaacatggtacgagcagtgagtgctgcggaggggcgcagaggcccgcgccctggctggccctgtgcatgctgccttgcgccctgctcccaggtgctcactaacccgtaatctggctctgtgtgcatgtgctgcccggcagggctgtcgtgtgcgtgttgggtgggaaggcggaggcggcgcggggcgggctggcctctgagcatctggctgcatttagcacg

SEQ ID NO: 761 - DNA, 505 bp, Artificial Sequence
  Synthetic
gagcctcctgcccctcaccaggccctgttagcatcacctcgggcacctggccacagcaggggccagtcagggcaccccgggatagcacgcccaggccctgtgcaaggcctctggcacttaggagaggcttttgcccctttgtcctctgagcagaagggttggcaaagagggaaggggacaggccagttctgcacctggcctttctccagaatgaaggcctccacctcccgtccgcacccacagaaagaaaagtaaactgttttcgcggctgcgcagaaagaagaacatggtacgagcagtgagtgctgcggaggggcgcagaggcccgcgccctggctggccctgtgcatgctgccttgcgccctgctcccaggtgctcactaacccgtaatctgctgctctgtgtgcagtgctgcccggcagggctgtcgtgtgcgtgttgggtgggaaggcggaggcggcgcggggcgggctggcctctgagcatctggctgcatttagcacg

SEQ ID NO: 762 - DNA, 506 bp, Artificial Sequence
  Synthetic
gagcctcctgcccctcaccaggccctgttagcatcacctcgggcacctggccacagcaggggccagtcagggcaccccgggatagcacgcccaggccctgtgcaaggcctctggcacttaggagaggcttttgcccctttgtcctctgagcagaagggttggcaaagagggaaggggacaggccagttctgcacctggcctttctccagaatgaaggcctccacctcccgtccgcacccacagaaagaaaagtaaactgttttcgcggctgcgcagaaagaagaacatggtacgagcagtgagtgctgcggaggggcgcagaggcccgcgccctggctggccctgtgcatgctgccttgcgccctgctcccaggtgctcactaacccgtaatctgctgctctgtgtgcatgtgctgcccggcagggctgtcgtgtgcgtgttgggtgggaaggcggaggcggcgcggggcgggctggcctctgagcatctggctgcatttagcacg

SEQ ID NO: 763 - DNA, 501 bp, Artificial Sequence
  Synthetic
gagcctcctgcccctcaccaggccctgttagcatcacctcgggcacctggccacagcaggggccagtcagggcaccccgggatagcacgcccaggccctgtgcaaggcctctggcacttaggagaggcttttgcccctttgtcctctgagcagaagggttggcaaagagggaaggggacaggccagttctgcacctggcctttctccagaatgaaggcctccacctcccgtccgcacccacagaaagaaaagtaaactgttttcgcggctgcgcagaaagaagaacatggttcgtgcagtgagtgctgcggaggggcgcagaggcccgcgccctggctggccctgtgcatgcgccttgcgccctgctcccaggtgccactaacccgtaatctggctctgtgtgcagtgctgcccggcagggctgtcgtgtgcgtgttgggtgggaaggcggaggcggcgcggggcgggctggcctctgagcatctggctgcatttagcacg

SEQ ID NO: 764 - DNA, 502 bp, Artificial Sequence
  Synthetic
gagcctcctgcccctcaccaggccctgttagcatcacctcgggcacctggccacagcaggggccagtcagggcaccccgggatagcacgcccaggccctgtgcaaggcctctggcacttaggagaggcttttgcccctttgtcctctgagcagaagggttggcaaagagggaaggggacaggccagttctgcacctggcctttctccagaatgaaggcctccacctcccgtccgcacccacagaaagaaaagtaaactgttttcgcggctgcgcagaaagaagaacatggttcgtgcagtgagtgctgcggaggggcgcagaggcccgcgccctggctggccctgtgcatgcgccttgcgccctgctcccaggtgccactaacccgtaatctggctctgtgtgcatgtgctgcccggcagggctgtcgtgtgcgtgttgggtgggaaggcggaggcggcgcggggcgggctggcctctgagcatctggctgcatttagcacg

SEQ ID NO: 765 - DNA, 503 bp, Artificial Sequence
  Synthetic
gagcctcctgcccctcaccaggccctgttagcatcacctcgggcacctggccacagcaggggccagtcagggcaccccgggatagcacgcccaggccctgtgcaaggcctctggcacttaggagaggcttttgcccctttgtcctctgagcagaagggttggcaaagagggaaggggacaggccagttctgcacctggcctttctccagaatgaaggcctccacctcccgtccgcacccacagaaagaaaagtaaactgttttcgcggctgcgcagaaagaagaacatggttcgtgcagtgagtgctgcggaggggcgcagaggcccgcgccctggctggccctgtgcatgcgccttgcgccctgctcccaggtgccactaacccgtaatctgctgctctgtgtgcagtgctgcccggcagggctgtcgtgtgcgtgttgggtgggaaggcggaggcggcgcggggcgggctggcctctgagcatctggctgcatttagcacg

SEQ ID NO: 766 - DNA, 504 bp, Artificial Sequence
  Synthetic
gagcctcctgcccctcaccaggccctgttagcatcacctcgggcacctggccacagcaggggccagtcagggcaccccgggatagcacgcccaggccctgtgcaaggcctctggcacttaggagaggcttttgcccctttgtcctctgagcagaagggttggcaaagagggaaggggacaggccagttctgcacctggcctttctccagaatgaaggcctccacctcccgtccgcacccacagaaagaaaagtaaactgttttcgcggctgcgcagaaagaagaacatggttcgtgcagtgagtgctgcggaggggcgcagaggcccgcgccctggctggccctgtgcatgcgccttgcgccctgctcccaggtgccactaacccgtaatctgctgctctgtgtgcatgtgctgcccggcagggctgtcgtgtgcgtgttgggtgggaaggcggaggcggcgcggggcgggctggcctctgagcatctggctgcatttagcacg

SEQ ID NO: 767 - DNA, 502 bp, Artificial Sequence
  Synthetic
gagcctcctgcccctcaccaggccctgttagcatcacctcgggcacctggccacagcaggggccagtcagggcaccccgggatagcacgcccaggccctgtgcaaggcctctggcacttaggagaggcttttgcccctttgtcctctgagcagaagggttggcaaagagggaaggggacaggccagttctgcacctggcctttctccagaatgaaggcctccacctcccgtccgcacccacagaaagaaaagtaaactgttttcgcggctgcgcagaaagaagaacatggttcgtgcagtgagtgctgcggaggggcgcagaggcccgcgccctggctggccctgtgcatgcgccttgcgccctgctcccaggtgctcactaacccgtaatctggctctgtgtgcagtgctgcccggcagggctgtcgtgtgcgtgttgggtgggaaggcggaggcggcgcggggcgggctggcctctgagcatctggctgcatttagcacg

SEQ ID NO: 768 - DNA, 503 bp, Artificial Sequence
  Synthetic
gagcctcctgcccctcaccaggccctgttagcatcacctcgggcacctggccacagcaggggccagtcagggcaccccgggatagcacgcccaggccctgtgcaaggcctctggcacttaggagaggcttttgcccctttgtcctctgagcagaagggttggcaaagagggaaggggacaggccagttctgcacctggcctttctccagaatgaaggcctccacctcccgtccgcacccacagaaagaaaagtaaactgttttcgcggctgcgcagaaagaagaacatggttcgtgcagtgagtgctgcggaggggcgcagaggcccgcgccctggctggccctgtgcatgcgccttgcgccctgctcccaggtgctcactaacccgtaatctggctctgtgtgcatgtgctgcccggcagggctgtcgtgtgcgtgttgggtgggaaggcggaggcggcgcggggcgggctggcctctgagcatctggctgcatttagcacg

SEQ ID NO: 769 - DNA, 504 bp, Artificial Sequence
  Synthetic
gagcctcctgcccctcaccaggccctgttagcatcacctcgggcacctggccacagcaggggccagtcagggcaccccgggatagcacgcccaggccctgtgcaaggcctctggcacttaggagaggcttttgcccctttgtcctctgagcagaagggttggcaaagagggaaggggacaggccagttctgcacctggcctttctccagaatgaaggcctccacctcccgtccgcacccacagaaagaaaagtaaactgttttcgcggctgcgcagaaagaagaacatggttcgtgcagtgagtgctgcggaggggcgcagaggcccgcgccctggctggccctgtgcatgcgccttgcgccctgctcccaggtgctcactaacccgtaatctgctgctctgtgtgcagtgctgcccggcagggctgtcgtgtgcgtgttgggtgggaaggcggaggcggcgcggggcgggctggcctctgagcatctggctgcatttagcacg

SEQ ID NO: 770 - DNA, 505 bp, Artificial Sequence
  Synthetic
gagcctcctgcccctcaccaggccctgttagcatcacctcgggcacctggccacagcaggggccagtcagggcaccccgggatagcacgcccaggccctgtgcaaggcctctggcacttaggagaggcttttgcccctttgtcctctgagcagaagggttggcaaagagggaaggggacaggccagttctgcacctggcctttctccagaatgaaggcctccacctcccgtccgcacccacagaaagaaaagtaaactgttttcgcggctgcgcagaaagaagaacatggttcgtgcagtgagtgctgcggaggggcgcagaggcccgcgccctggctggccctgtgcatgcgccttgcgccctgctcccaggtgctcactaacccgtaatctgctgctctgtgtgcatgtgctgcccggcagggctgtcgtgtgcgtgttgggtgggaaggcggaggcggcgcggggcgggctggcctctgagcatctggctgcatttagcacg

SEQ ID NO: 771 - DNA, 502 bp, Artificial Sequence
  Synthetic
gagcctcctgcccctcaccaggccctgttagcatcacctcgggcacctggccacagcaggggccagtcagggcaccccgggatagcacgcccaggccctgtgcaaggcctctggcacttaggagaggcttttgcccctttgtcctctgagcagaagggttggcaaagagggaaggggacaggccagttctgcacctggcctttctccagaatgaaggcctccacctcccgtccgcacccacagaaagaaaagtaaactgttttcgcggctgcgcagaaagaagaacatggttcgtgcagtgagtgctgcggaggggcgcagaggcccgcgccctggctggccctgtgcatgctgccttgcgccctgctcccaggtgccactaacccgtaatctggctctgtgtgcagtgctgcccggcagggctgtcgtgtgcgtgttgggtgggaaggcggaggcggcgcggggcgggctggcctctgagcatctggctgcatttagcacg

SEQ ID NO: 772 - DNA, 503 bp, Artificial Sequence
  Synthetic
gagcctcctgcccctcaccaggccctgttagcatcacctcgggcacctggccacagcaggggccagtcagggcaccccgggatagcacgcccaggccctgtgcaaggcctctggcacttaggagaggcttttgcccctttgtcctctgagcagaagggttggcaaagagggaaggggacaggccagttctgcacctggcctttctccagaatgaaggcctccacctcccgtccgcacccacagaaagaaaagtaaactgttttcgcggctgcgcagaaagaagaacatggttcgtgcagtgagtgctgcggaggggcgcagaggcccgcgccctggctggccctgtgcatgctgccttgcgccctgctcccaggtgccactaacccgtaatctggctctgtgtgcatgtgctgcccggcagggctgtcgtgtgcgtgttgggtgggaaggcggaggcggcgcggggcgggctggcctctgagcatctggctgcatttagcacg

SEQ ID NO: 773 - DNA, 504 bp, Artificial Sequence
  Synthetic
gagcctcctgcccctcaccaggccctgttagcatcacctcgggcacctggccacagcaggggccagtcagggcaccccgggatagcacgcccaggccctgtgcaaggcctctggcacttaggagaggcttttgcccctttgtcctctgagcagaagggttggcaaagagggaaggggacaggccagttctgcacctggcctttctccagaatgaaggcctccacctcccgtccgcacccacagaaagaaaagtaaactgttttcgcggctgcgcagaaagaagaacatggttcgtgcagtgagtgctgcggaggggcgcagaggcccgcgccctggctggccctgtgcatgctgccttgcgccctgctcccaggtgccactaacccgtaatctgctgctctgtgtgcagtgctgcccggcagggctgtcgtgtgcgtgttgggtgggaaggcggaggcggcgcggggcgggctggcctctgagcatctggctgcatttagcacg

SEQ ID NO: 774 - DNA, 505 bp, Artificial Sequence
  Synthetic
gagcctcctgcccctcaccaggccctgttagcatcacctcgggcacctggccacagcaggggccagtcagggcaccccgggatagcacgcccaggccctgtgcaaggcctctggcacttaggagaggcttttgcccctttgtcctctgagcagaagggttggcaaagagggaaggggacaggccagttctgcacctggcctttctccagaatgaaggcctccacctcccgtccgcacccacagaaagaaaagtaaactgttttcgcggctgcgcagaaagaagaacatggttcgtgcagtgagtgctgcggaggggcgcagaggcccgcgccctggctggccctgtgcatgctgccttgcgccctgctcccaggtgccactaacccgtaatctgctgctctgtgtgcatgtgctgcccggcagggctgtcgtgtgcgtgttgggtgggaaggcggaggcggcgcggggcgggctggcctctgagcatctggctgcatttagcacg

SEQ ID NO: 775 - DNA, 503 bp, Artificial Sequence
  Synthetic
gagcctcctgcccctcaccaggccctgttagcatcacctcgggcacctggccacagcaggggccagtcagggcaccccgggatagcacgcccaggccctgtgcaaggcctctggcacttaggagaggcttttgcccctttgtcctctgagcagaagggttggcaaagagggaaggggacaggccagttctgcacctggcctttctccagaatgaaggcctccacctcccgtccgcacccacagaaagaaaagtaaactgttttcgcggctgcgcagaaagaagaacatggttcgtgcagtgagtgctgcggaggggcgcagaggcccgcgccctggctggccctgtgcatgctgccttgcgccctgctcccaggtgctcactaacccgtaatctggctctgtgtgcagtgctgcccggcagggctgtcgtgtgcgtgttgggtgggaaggcggaggcggcgcggggcgggctggcctctgagcatctggctgcatttagcacg

SEQ ID NO: 776 - DNA, 504 bp, Artificial Sequence
  Synthetic
gagcctcctgcccctcaccaggccctgttagcatcacctcgggcacctggccacagcaggggccagtcagggcaccccgggatagcacgcccaggccctgtgcaaggcctctggcacttaggagaggcttttgcccctttgtcctctgagcagaagggttggcaaagagggaaggggacaggccagttctgcacctggcctttctccagaatgaaggcctccacctcccgtccgcacccacagaaagaaaagtaaactgttttcgcggctgcgcagaaagaagaacatggttcgtgcagtgagtgctgcggaggggcgcagaggcccgcgccctggctggccctgtgcatgctgccttgcgccctgctcccaggtgctcactaacccgtaatctggctctgtgtgcatgtgctgcccggcagggctgtcgtgtgcgtgttgggtgggaaggcggaggcggcgcggggcgggctggcctctgagcatctggctgcatttagcacg

SEQ ID NO: 777 - DNA, 505 bp, Artificial Sequence
  Synthetic
gagcctcctgcccctcaccaggccctgttagcatcacctcgggcacctggccacagcaggggccagtcagggcaccccgggatagcacgcccaggccctgtgcaaggcctctggcacttaggagaggcttttgcccctttgtcctctgagcagaagggttggcaaagagggaaggggacaggccagttctgcacctggcctttctccagaatgaaggcctccacctcccgtccgcacccacagaaagaaaagtaaactgttttcgcggctgcgcagaaagaagaacatggttcgtgcagtgagtgctgcggaggggcgcagaggcccgcgccctggctggccctgtgcatgctgccttgcgccctgctcccaggtgctcactaacccgtaatctgctgctctgtgtgcagtgctgcccggcagggctgtcgtgtgcgtgttgggtgggaaggcggaggcggcgcggggcgggctggcctctgagcatctggctgcatttagcacg

SEQ ID NO: 778 - DNA, 506 bp, Artificial Sequence
  Synthetic
gagcctcctgcccctcaccaggccctgttagcatcacctcgggcacctggccacagcaggggccagtcagggcaccccgggatagcacgcccaggccctgtgcaaggcctctggcacttaggagaggcttttgcccctttgtcctctgagcagaagggttggcaaagagggaaggggacaggccagttctgcacctggcctttctccagaatgaaggcctccacctcccgtccgcacccacagaaagaaaagtaaactgttttcgcggctgcgcagaaagaagaacatggttcgtgcagtgagtgctgcggaggggcgcagaggcccgcgccctggctggccctgtgcatgctgccttgcgccctgctcccaggtgctcactaacccgtaatctgctgctctgtgtgcatgtgctgcccggcagggctgtcgtgtgcgtgttgggtgggaaggcggaggcggcgcggggcgggctggcctctgagcatctggctgcatttagcacg

SEQ ID NO: 779 - DNA, 185 bp, Unknown
  May be homo sapiens or mus musculus
atgttttaatggctttaaaaaaaatacatttcaccttttatagtaatgttaattctatgtatttcctgtcaatagaaatctaatttatatttcgctaaacccaagctaaaaatatatattgactgtgaaatgtgcattaaattgttattgatcatagttatcaacattatgctatgttataacag

SEQ ID NO: 780 - DNA, 133 bp, Unknown
  May be homo sapiens or mus musculus
cactagatgatagccactccgcagggtgatgtctggtcagggaatgcttttaccttctcaatcttttacccattcttttctctcattttctcttgatgatgtgtctcttttctccttaactttcttttcctag

SEQ ID NO: 781 - DNA, 201 bp, Unknown
  May be homo sapiens or mus musculus
acacttagccgggtgtggtggcgggcgcctgtagtcccagctactcgggaggctgaagcaggagaatggcgtgaacccgggaggcggagcttgcagtgagccgagatcgtgccactgcactccagcctgggcaacatagcgaggctccatctcaaaaaaaaatttttttattttccttactctcctctgcaatgactgtag

SEQ ID NO: 782 - DNA, 227 bp, Unknown
  May be homo sapiens or mus musculus
cagcccttgctgcagtcgatttggagtatcaagaaaggaagttggtcataggagagagtagatctgaaaatgtccagtcatggttgccagagtagatattttcctaactgtggtattagacccacagtcacactttcctaatttctaatgattccctctcttcatctgcttctgaaactcttcactctgtcccctcattcctccctgtggttcctgtgcctgtccag

SEQ ID NO: 783 - DNA, 189 bp, Unknown
  May be homo sapiens or mus musculus
catttggttgtatatgtattgtctcataatttaatgaccagtaattttttatcagtaatttgtttatagtattcctctatgagacatgtgttttgtttatatccttcttcttttttaatgtataatcaaattcttattattttctattttattactgtcttttcacctttcttttcctatttgtgtcag

SEQ ID NO: 784 - DNA, 198 bp, Unknown
  May be homo sapiens or mus musculus
caataatgtactatcttaattgtagtatgttgtttgctacttaaaaatgtcctcatataaaggcccccataaggttgatagcattcagggttttgaatgagctatatgtacatgtatcagatgaatgtcctaaacaggtatggcagaggcattcagcatatggctgattttaagcccaactctttttttccatttcag

SEQ ID NO: 785 - DNA, 258 bp, Unknown
  May be homo sapiens or mus musculus
ctaggtagctgctggtttgccatggtagatgaaatattataattcatgatgtaagattttgagtttcttacattgtaagtcacaagaatagccttgcttggaatcactgcctcccaccaccagcctcctccctcccttcctttctctttctttttccccgatgccctatccatacatggtttgcttaggatgtgtttccgggtttctctgagcttcacatttttttccttttttttttttctttgcttctcccccaag

SEQ ID NO: 786 - DNA, 170 bp, Unknown
  May be homo sapiens or mus musculus
cgtggacctctgcagcggcgataccactccacaccccagagccgccacggcatccccccttccgcctcgtgggtctccctgaatttcctcctcagctgtggccccctgcgttcctggcttctcgtcgttctcttccctcccactccactcatcttgaacactctctgtag

SEQ ID NO: 787 - DNA, 197 bp, Unknown
  May be homo sapiens or mus musculus
aaaatgtgatggtaaacacagatgacttttgggagtaatatccttccctgtaacaccctccataagactgcatcatgatgattacgtatcagcgtatttcacaaccagcttaaagatgcagcttatttggaaacaacactattcatagaaacctactaacctaaaatgtttttactacttttatttcttaaatgtag

SEQ ID NO: 788 - DNA, 175 bp, Unknown
  May be homo sapiens or mus musculus
ccccacagacctgctagtggactctgtgatgaaaatagtgtgtggccaggctccacatgggcaactagcgaccccttggtgagattatgacacctctcgcttccccctgtgtaaccagggaagctaagcatgtttctttcacttcacccatcttcctacattttttccttcctag

SEQ ID NO: 789 - DNA, 206 bp, Unknown
  May be homo sapiens or mus musculus
gctgttggtgttgattgttgtgtagccagagttagaattgtgtttggctaagaatgtacacatggaattaaaatcttagtggaggcagataaatcatgttctaacattattacttacctagtaaataagctttcttgtaggagaaatacacaaggagttacttacatgtaagaatgaagttaatatttttaacatttttccttaag

SEQ ID NO: 790 - DNA, 161 bp, Unknown
  May be homo sapiens or mus musculus
tagtctagatgaaaccacaagtaatggcagctaattgatactctctttagcctcaaggcaaaaatgtccagcaaatggctgcatggcccttgcttggaatcaatatcactctctgttctcctctatttttcttgtgtgtcctcctctctgccggctttcag

SEQ ID NO: 791 - DNA, 88 bp, Unknown
  May be homo sapiens or mus musculus
ttaaattgtacatttctgagtttaaatttatacagctgttgttaaatgacaatcattgatctctgttcaatttatcaatatacgttag

SEQ ID NO: 792 - DNA, 173 bp, Unknown
  May be homo sapiens or mus musculus
cgaatcttgacctgagctaaggatgtgcggctcttcatgttcctgagccaggttgggtgaacttccacggccttctaggtggtaccttttataaccctcaggtggtgcattcacccggacaaactggtttgaaagtccataaagctttaacaaacaattctcttgttttacag

SEQ ID NO: 793 - DNA, 334 bp, Unknown
  May be homo sapiens or mus musculus
ctgaaataatgagctgtaaggggaactaaaattcccctgggctggttcctaagtttataggcaagaaaactgaggccaaagaagtaaagtgacttatctaaagtaacacagtttagtggcagatcttgattaggatcaaaactttctgtcagcccatacattgtgcttttcacaattcttcaggttttaaattctgctaagctcacaatctgatgttgaaaagaggacatgttagtaatgactctgtccctttattttcttcaccactcccctacaaaattttaaattcttgaaatcttttgctaattgagattttcatcttgtgcaaacacag

SEQ ID NO: 794 - DNA, 177 bp, Unknown
  May be homo sapiens or mus musculus
tgagtttgtatttgcttttgaagttctttcgtgattttttctccccaaaaataattagcaaaatattctgttaaaatttttgatttaacgtttctgaatttaaaactatgctgtccttaatgcttcttttcttctctctccttatgaatgtttcctctttggcaattgcttttaaag

SEQ ID NO: 795 - DNA, 259 bp, Unknown
  May be homo sapiens or mus musculus
ccgtggatatgttgacatctttaaaacatttcttttagccttgtacagtggttaattttaatgatttccatatttgatgttgtttttgatcttcttttcattttgtttcctgcttttcgcattctcctccccacccctccctcttctccatcccatttttcactgtcgggtcgtatgtgtctgtgtgtgttgtgtgtgttggtttctgttgtctggtgttctctcctctcttctcgtcctcacccttctgctgctgtag

SEQ ID NO: 796 - DNA, 200 bp, Unknown
  May be homo sapiens or mus musculus
ataatgcagaaagacttcatgacctaaaaaatccataatggagttaaagcttctaggagacatgaacctgacctcacaagaaaaccaaagatgtttaggatgtatcgtttgtggctataccatagtataatagcaaccaactaggtcatctgatgtatgatctcagaaaacagccccctttttatcccctaaaaaatcag

SEQ ID NO: 797 - DNA, 240 bp, Unknown
  May be homo sapiens or mus musculus
gtgtcctgatgactttgagaagacaagcataggtctattctcataggtaatgattctcacaactttatcctggagattaacctggggtcttggttttagttctttttcctcttccttgcccttaccagcagttacacctatgaatttgggtggctgggtgattggtatttctgacagtgatttatgtagggtggttttgtttcccatttttacctttataacttttcactcttttttcag

SEQ ID NO: 798 - DNA, 211 bp, Unknown
  May be homo sapiens or mus musculus
atatatatataactatatatataactatatatatgtatcccctagtattggatcatgaagagctcttcatgcattctttgcaaaggaggttataaagttacgccctcagaacatttataactataagaatgtgccagttaaagtgctcaacaggaaatatgacagtttaaaagcattgtaaaactcacatagcttacttctctctctaaag

SEQ ID NO: 799 - DNA, 219 bp, Unknown
  May be homo sapiens or mus musculus
tattgcttctaacctggattgaaatctatgactttttataacagtcattgagtctgtttcaaaggaatcttgtggtaagtatttttgcatgatgtactcaaggtatcaagtttaacaattgactttttttcattggaaagcatatgtgattaactagcatggattgcttcttgacctgcttgttttgtgtttgtctttttcttctaatataataaccag

SEQ ID NO: 800 - DNA, 179 bp, Unknown
  May be homo sapiens or mus musculus
tctgttttcatgtcttcaactaatttccagtgagctcttgtgttttaatcatgctatcttggccgtatgaaagtataacactaagaaaaaaattcatttttttcaaacgtaaccttccattctttctccctttcctctaaactaaaaccttctttcccatcttttctttcttgaaccag

SEQ ID NO: 801 - DNA, 231 bp, Unknown
  May be homo sapiens or mus musculus
agacatagaaacagacttcctaggtaacagtcccagctcccaaatcctcaggcttccgctccagcaggcagccttgtgtccgtaggcagcacccactccccttgcttttgagttcacctttctgtgttgatacagttctcccagtgtacccctccttgtttgagccagtctccatgtttgtctttatgtctttatgctcatttcttcatttcctcctctgcttcccgtcag

SEQ ID NO: 802 - DNA, 188 bp, Unknown
  May be homo sapiens or mus musculus
atgtgtctcggtaattcaggcaaaaggactggatttttaaaagcagtttgaatttctttcatatcactagtgaagcttagtatgttccagaattcaaggagcctaaattgtatgtggattcctactcgtttattctctccatttgtatcttcctctattctctctcccaaacctgctcctctgcctag

SEQ ID NO: 803 - DNA, 181 bp, Unknown
  May be homo sapiens or mus musculus
tcttggcctagaactctaaagagagaaagcaggttatttttaattactgcatctactgccctttgtattgttcttgttgtgtgggcgacttcctcctattgtccctgcccagttcctcaactgcctgagtgtttcccaaatgttctttctggatgcaccatttacccttttgtgttttcag

SEQ ID NO: 804 - DNA, 177 bp, Unknown
  May be homo sapiens or mus musculus
cagaggcagtgggtgcacataggaatgggtgtgtgaaactcagcttgcaatacatgctggccaaagagcacactgctctgctgccctttagcactctgttcagcctgctttcatacagtcttctgctgaacctttcttctctcctttctctctgtgttttgtgcccccttgtggtag

SEQ ID NO: 805 - DNA, 258 bp, Unknown
  May be homo sapiens or mus musculus
gtgtcctggcaagacccccagaaccaaagaatttactgttttcctcactggctcgcagctttgagctcaaggcatgtcttaaaacagtgcaactcacttcaaatgctttttgcttttcatttattattgcttgtcacgcgatgttctttgaaagcttgctcatatattatctgttccattttttttccattttccctttttttgcatgccgttcctcctgtttcttcccttcctccaatcctctgttcccgtctgtag

SEQ ID NO: 806 - DNA, 189 bp, Unknown
  May be homo sapiens or mus musculus
tgcagtgtaaccaggagccagataatcctttctggctccaaagacaggggtttctgtgttgtcctgagacatgggtctcctttctttgccttcttgagtgcacaggcatgggactgcatgattgaggcatgtatcaccatgtgtgactcctgggataatccttgtttcttctatttctgttctgtgcag

SEQ ID NO: 807 - DNA, 254 bp, Unknown
  May be homo sapiens or mus musculus
ggttggcctctcaacagatggcctgcaggtctcctggcctcagttaagccagggccccaggggtctgacactgagtttttcaacgtctgttctctttttctttctgtctgccttgccccacttctgtccctccaccctgggagcaccatcgccgctggggtttctctctcgtttgctctgctttcctgctgctgctgctcctgtctcaagtgtatcaaggccttcttctcatgacttttctttctgtctttcag

SEQ ID NO: 808 - DNA, 201 bp, Unknown
  May be homo sapiens or mus musculus
tttgggagctggggagagccaccactgggtgacacttggatctctctggctccatcccgcccactcaggcagctcccctcaggtccctccgtaggcactgctgtaggtgtgaagatgtgtgtctacttgtgccctcatgtgatgttctaagactaactgcacgctgtgtttgcacgcttcctctcgtggctgttgaaacag

SEQ ID NO: 809 - DNA, 212 bp, Unknown
  May be homo sapiens or mus musculus
ccagggaggggctctctgcattgaatggactttcccagatgacatgtctgtcaccctctctagggtaaaggtgttttacatctttatttactgcttttgtgaagctggggggaaactgctattgcaaaacaaagtctgtttatgtaactgcaatgtatacaactttgcacaaattcttagtggtaatttcaactaacatttctatccaacag

SEQ ID NO: 810 - DNA, 227 bp, Unknown
  May be homo sapiens or mus musculus
aggggccccaggaacacttggtcccctcacatgaaacctcttctcagtgtcagtcaccactcaccccctccttctccatgggattatttttctttctgtttgagtttttctctcttgctcgatgacactcttttgtttatttctttgcttccccgtaactctgttgggctggactttggcctctcttgtttcttcatgtggcttctctgcttcttggttcactggag

SEQ ID NO: 811 - DNA, 226 bp, Unknown
  May be homo sapiens or mus musculus
tattaataaatgttttacatattaatgatccttttgacgtgactggatccccacccttcatttcatgtgcttctattttcctacatcttttacatgactaaggattaatgaaatcacctcttcataatcatgaccataatttcatccaacaagtactcaagtttggtgttagcactttattaatgcttacgacttctctctctctccctctttctcttttccttag

SEQ ID NO: 812 - DNA, 173 bp, Unknown
  May be homo sapiens or mus musculus
atcctcactgcccacctcatctcacctccacctcttcccttctccattcccctttggttcaccctttggcagaaggtactggtggctcagcctgcatgccgctgtctctcctctcgtgctggcatgtcatggtggcactgttgtgttctcttcctcttcctttttactaacag

SEQ ID NO: 813 - DNA, 228 bp, Unknown
  May be homo sapiens or mus musculus
taagttttcaggtgttatctttagagtgaggtttttctttttttttttttcttttttttttctggaaactttgagtcacccccttctggggcctaatttatctactttgccttggcacttgtgaaagaaaagtaacttcttcaagttgctgtgttaggcaaaacctaaagtgtaattttactttgtgtacatttactcatcaaaattcttttggaaattaaaatatag

SEQ ID NO: 814 - DNA, 206 bp, Unknown
  May be homo sapiens or mus musculus
agaagacataaatatcaaactttttacgtaacttagctatactttaaacatgctaatatccagtgcaagtagaaaagcagggcactatgaaggaaatgtttgctatatatctgttattcatgctgttgattttgagtccaaagtcagtgtccttacctgttgacatctgtattctttctctcataattctaactctttcactatag

SEQ ID NO: 815 - DNA, 210 bp, Unknown
  May be homo sapiens or mus musculus
ctttagtgccatcttgtggccaatgtaacaaaatccagtgaaaaattttaaaaattgttcagaatgcattttatcttacaaaaaaggaagaaaggaaagaaggagttctctaataaaaagcttttttttaaaagagcatgtttcttataacttttctaacaaatcataaccaattaaagccacctacttaatgttctttttttcttgtag

SEQ ID NO: 816 - DNA, 208 bp, Unknown
  May be homo sapiens or mus musculus
gtctccgcacgctgctgctggctgagctgacactcggtgagtgtgatgccacatctgggggaccccaggaagcctgggttggggacagggtggggagagggctagaaagaagaggcagggcttccccgtgtgcctgtctaactcagtgtccggcctgaggggtgttccttgcgccctgccctgggcactaacaggtctgtccttgcag

SEQ ID NO: 817 - DNA, 209 bp, Unknown
  May be homo sapiens or mus musculus
ttctttgctttgccttctgcctggagcactttgtccctcgtgtcttttgcctcattaaagttctactggtcctcctgtttccactctttccttcttccaccctcattttacacttacttagcaggttcttctttttaattccatgcttcttgcagattttgtattctgtgtgtctattttcttgtttttcttttcttttttccctctag

SEQ ID NO: 818 - DNA, 182 bp, Unknown
  May be homo sapiens or mus musculus
gcccctaagctccttttttcctagctcccccatcccccacttcatctcaaaatgctattcttgcctatatgctgtgtaaaaagtgcctttttctttttatatgttgatagatggaatggtcctttctcttgttctctctctctcttgctgagcaagctgtcacaatctctgattccttgcag

SEQ ID NO: 819 - DNA, 159 bp, Unknown
  May be homo sapiens or mus musculus
tgcatgcttcttctttttttttcatgtaagatccagccctgagccttgaaaggaaagattaaattaatagcaagaacctgtttatatgctttttcatagtgaatgaagattttgtcaaaatataaattaagacatatttgctgtattttctgtactcag

SEQ ID NO: 820 - DNA, 227 bp, Unknown
  May be homo sapiens or mus musculus
tttattaataaaaatattcattccttctactaatttgaatgtaatgtaggctactaaaattgtgtgtccctgtgccttgaaataatctatatcttctatggctatcagttttgtgatcttttaaaataatattgctacagattggaaaggtatatcaagtatcgtttaatttaccaatggtgagaaataaaaatgaatgacatagtgtttatttttttttcaactag

SEQ ID NO: 821 - DNA, 129 bp, Unknown
  May be homo sapiens or mus musculus
tcatgcactttcatggaattgttctccctctccactcttcctcatggtctgtggtgctgggcactgagcctcttcaatttgtctgtcattatgaccaagcgacataacccatttccattctttccctag

SEQ ID NO: 822 - DNA, 171 bp, Unknown
  May be homo sapiens or mus musculus
cccttctctgcctcagtccctgggctccagggctcagctccacagccctctgcctagcaggctggttctccctgccaagcccatacctgtggtcacctggccctcctgtggtctgagtaccactcccctgccccaggagccactcccactccagctgcctgtttccagcag

SEQ ID NO: 823 - DNA, 199 bp, Unknown
  May be homo sapiens or mus musculus
attcaaaatgttgtgtgtgttctctgatttcttttcttacagcttgccagtatttgccgtgctgaaatgttttaatttataatttccttcctttgtaccttttagttttctctgttgctgctttttctgtgacacgagcctttcattatagtcactcttcttttttccttccccacttctttcttttccttttttaaag

SEQ ID NO: 824 - DNA, 211 bp, Unknown
  May be homo sapiens or mus musculus
ataggggaatgcccagttggcctttcttttgtttaaaaaaaaaatgttagtggaaaaatgtgtgccactcttgaatggaaatatgattctagacagccagacttacagttggaaggttattagaactctgttcgcttttttagtcttaattttgatttttcaaatgttttgtttcttggttttaatttttggtttgatctgttgttccaag

SEQ ID NO: 825 - DNA, 150 bp, Unknown
  May be homo sapiens or mus musculus
gcaccaactcattacaggatggaggggcagaacgcccagagcacccctgggctcacgtgcggtacagctgcaggagagagctgtccttttggttttatgtttttaattaattctgtttcctcagattgatgattaaatttatttttccag

SEQ ID NO: 826 - DNA, 231 bp, Unknown
  May be homo sapiens or mus musculus
ttgcagtgagccgagattgcaccactgcactccagcctgggggacagagcgagactccatctcaaaaaaaaagaaagaaaagaatgccagggttaccctagaagagtggtcatcaaagagtaggacgagtcaagtgtgaacttctaaccagaactgaccttctgtgtgaaagtaggaagttctcttttccttccaaagctcttctacttctgcctgtccttttctttgcag

SEQ ID NO: 827 - DNA, 142 bp, Unknown
  May be homo sapiens or mus musculus
agcttcctcaggcgtgtttttacaaaatcctagagcaaactttctcataaaatttactcaaactttatttaaaaatgcaacagaccaatcaaaaaaaatcttgacactatccatattaataaaaatctgtttgccaccacag

SEQ ID NO: 828 - DNA, 206 bp, Unknown
  May be homo sapiens or mus musculus
tgaccctgtttctcagcgtggggagtgtgtgatcctgtttcttgtctggtaagttgcttagtcgtgatggtcaacagttaatgcttaatggtggcacttctgctagacttttgtgcagtttttataaaatagccttgtaacttttcatggtttttaaaaaagtgatatgtttttgtttggtcttgatggtcctgttcccatttcag

SEQ ID NO: 829 - DNA, 221 bp, Unknown
  May be homo sapiens or mus musculus
aggccctctggctccagactctaaattatactctgaatgatactcactgattgtccgaggacacaaagagtgtcgaggcactatctgctgggtgtctgcagaaccttactgttctaaagcaaaacattttacccctggacaagagcagcaaaggtggcgttcggccctccttggctctcatttgactgttcaaagccaggtgcttttctttcttgggtcag

SEQ ID NO: 830 - DNA, 68 bp, Unknown
  May be homo sapiens or mus musculus
gtaagggaagtggaggaagacagggctggggcttcagctcaccagaccttccctgacccactactcag

SEQ ID NO: 831 - DNA, 206 bp, Unknown
  May be homo sapiens or mus musculus
cagagatccttctgggggccactgctgggtgggcaggcaggagtgggcttccagaagcctctggccctgcccccagcctctctgtgcctgtcctttgtcccatctctctggctcatctcaatgcccttgactcagcggaccacgctcttcactgtgttgtgtctcccccatccccgccccctctccggctctgtcttctctcttag

SEQ ID NO: 832 - DNA, 188 bp, Unknown
  May be homo sapiens or mus musculus
cttggttactaaacttttcttcttttttccaggcaggtaagggggacgtgctggggtggaggttgggagcagggcatcacatttccttacgtggcaaaggatcacgtctgaagagtgacttttctgtttccacaatatgtgctattgacttctttctcatgggtcttgctgtgacttttctttctgag

SEQ ID NO: 833 - DNA, 244 bp, Unknown
  May be homo sapiens or mus musculus
ctaccaagtagcctcttaatagaaatgtagaaaatatacaggacagggtggagatgagctcttgaatttagtagggtgaaagagttaactgccaacccggcactatcattgtacttgtttggagaaaatctgttttgttctggtgatgatggttttatcttcccttttagttgggtgggaagtaacagaaaatttgtttccccaaaagtttgacattttcttgttaatacacgtttcatttcag

SEQ ID NO: 834 - DNA, 208 bp, Unknown
  May be homo sapiens or mus musculus
tgctcactgaagtcaggcttgaaacggctgttcccaaggtggcttgaggtagaggaggggctcagggccctctccgatgcccccttccccatccccatctgacgtccccctcctggagatgaagggcttcttccctgtaccccaaggggcggcctgcctggcccctggataaacgctgcttgtgtttgtgcggccgacatctcgccag

SEQ ID NO: 835 - DNA, 149 bp, Unknown
  May be homo sapiens or mus musculus
atgagcagctaaggacggtcctgggtgctcactgaagtcaggcttgaaacggctgttcccaaggtggcttgaggtagaggaggggctcagggccctctccgatgcccccttccccatccccatctgacgtccccctcctggagatgaag

SEQ ID NO: 836 - DNA, 201 bp, Unknown
  May be homo sapiens or mus musculus
tggaggagatgtcaaagtggttttccttgaatgctctgtgagcatacggttgttggatggattggaacgctactctcactcaatagactctctctctctctgtgtctttgtgcatggcttcccgccaaataattcaccagcttgactgcatcacagacttgacgtgtcacctttctcgtttgtgtcctttgtcacccacag

SEQ ID NO: 837 - DNA, 210 bp, Unknown
  May be homo sapiens or mus musculus
tcctaataaccgtctctgctttaccaaacaagagcacctggttttctattttatttcccattcttttcgtttccaaactctgagattccttcgttcttcctcctccctgtctcctctgcctacgattttgtctaacaagctgtgaatgtttatgtgcctgagtttgtgtctctcttttgtgcttgactctgcctctctttgttcactcag

SEQ ID NO: 838 - DNA, 215 bp, Unknown
  May be homo sapiens or mus musculus
ctagtttttatgctgggctagtgattcatttttatttcccttgaatgtgtttccccatcctttcccccatcattatgtttaattatttcctccacgctttaaataggccagacctcttattattgctgtttgcgttgttgtttgggttcgcgctcctaatcacacacaccgggagatcctcctatgaagctaacttgtttttgcctccaaaatag

SEQ ID NO: 839 - DNA, 167 bp, Unknown
  May be homo sapiens or mus musculus
ggggcagggcggggcggggggccgatgggacctaacctgtcttccactctgctctgtctcctgtaccccaacatttcctcttcctcctcctcctcctcctcgtttcctcctcctcctcctcctttcctcctcccctgtcacccctcacctccctcctcacactgcag

SEQ ID NO: 840 - DNA, 139 bp, Unknown
  May be homo sapiens or mus musculus
ccttgggggtggcactaaccttctttgggggtgggggcggggaccgagtctgtggccatccctaagtccgctccttgcgtcctcctctgcctgccccttaactcaccccttctctcccctcttcctactaacgggtcag

SEQ ID NO: 841 - DNA, 171 bp, Unknown
  May be homo sapiens or mus musculus
tggcacgtcagtcagtgagacctcagcatggataggtggctcagtcatcagaactccccagcgcgaacaatgtcgtaattacattaaccaaatgtgactgacattttgtgagtttatctgtcttcattaaacttgttcaccttctctgaaacccttcatgctgcacgctag

SEQ ID NO: 842 - DNA, 243 bp, Unknown; identical to SEQ ID NO: 15
  May be homo sapiens or mus musculus

SEQ ID NO: 843 - DNA, 245 bp, Unknown
  May be homo sapiens or mus musculus
ttttaactattctgggttgtatgcttgcatctttaaccataggaagcctattgcatgcactagatgattgagtgacctggtggatttcttgttttgttttcgattttttttttttaatactaaccagaacatgtgttttttaattgtgaatagtactttagctttagctattcatagaatgtatttgcttgactaacttatggccttttttgctaatgcttcatggttgtcctacaaccatttag

SEQ ID NO: 844 - DNA, 210 bp, Unknown
  May be homo sapiens or mus musculus
taatccatctgcaatgatttctttgccttgtctgtaccatttgacgataggttttggatgaccagtcactttgcagaccaaggtagcattgctctgatatctgacatttagatttctcagttcctctttaaagtgtggtgcctgaattgggacatcagatttgggagtgatgggttctgatatttcactccattcactttccccacctag

SEQ ID NO: 845 - DNA, 195 bp, Unknown
  May be homo sapiens or mus musculus
taaaaatatcatatgggatacacctgaactttaatctttaaatattgaagtttattttcccttaacgcttaataaaataaaaaagaaaattgggtgctcagactacccaaatagaaactaccctgaagtataaaagatttagggaatcacctgttttcccttgacatcatctgccttttttgccatttcccccag

SEQ ID NO: 846 - DNA, 261 bp, Unknown
  May be homo sapiens or mus musculus
tggtaccacatggtttgggttcaatgctgatgcaagtgggccagagacggctcccctggaagccccataggcaggctgtgggtgctggggtcaccgaggtcccccgcgttctggagctgaagaccttcaccaccctgcttgtggccacacacccactgctggccaccctggcctgtgaaaggcgtgcctgaccctctggagacaaacctgttcttctgtttctctgtctctccccctcccccacgcttccctcccccatag

SEQ ID NO: 847 - DNA, 167 bp, Unknown
  May be homo sapiens or mus musculus
ttgccagctgctgccgccgccaccaaaactcccagaacaggactcttcttctcttagaggctcgtgtgctccagcaccctctccccactccttttggaggtccagaccacttccaggctctaatctgtgtctccttgcccttttcctggcccggcctccaccctaag

SEQ ID NO: 848 - DNA, 221 bp, Unknown
  May be homo sapiens or mus musculus
aattctgtggccctgctcaggggagctatgcattgggtgaaatctctgatctttcatacctatctgatacccattcttgaagaaaaaactcacagtacagaagtttctcgattactgtttgtctgaaagtgcagctggttaaccttgctttcctcttctctatgttccttctcttctctttcctcttccccttgttcgtcaatttctattctctgtttcag

SEQ ID NO: 849 - DNA, 156 bp, Unknown
  May be homo sapiens or mus musculus
gcagtgcagtagatatgaagaattattttccttaagttggaatagatggctctttggtcagatgcacatgtatatatagttctgtctagacatgaaaaagatttgtttttgtgagttctctgatgattagaatttttttctgttgtgtatccttag

SEQ ID NO: 850 - DNA, 179 bp, Unknown
  May be homo sapiens or mus musculus
cctatttcttcattttggaatcattaagagtaatgatatggttttagaattcttaacacaaaaatgccctgcattgatataactggccagtacaaacgatgctttttttatatccctgttagctattaaaattctatgctgaaatttgatttcctcttatttacttttgctgcaagaag

SEQ ID NO: 851 - DNA, 220 bp, Unknown
  May be homo sapiens or mus musculus
gaaagacatttgtgcccaaaatattagaggttcctgatgataaaagtaatagtttaaaaaaagaaactctctattaatatgtttttataaatcaggaggcaaaaacataaactgttgagtttcagtgttgtatattattttaccatcatgttcatttgtcttcacagtttggctccccccttccccttttcacccacactctcctgttttgtgttgttag

SEQ ID NO: 852 - DNA, 223 bp, Unknown
  May be homo sapiens or mus musculus
ttgctgtagtttgttgagttttggcatggccccatgaggcagatagtactattcagttttagatgcttctacagactgactccgtggcagagtcaggttgccatgcagtaatttcagaaggagcccctattggccattttctacaaccttttttcttattccctctctttttctcccttctctggctggctgtgattctgtaattctttctgattcattccag

SEQ ID NO: 853 - DNA, 167 bp, Unknown
  May be homo sapiens or mus musculus
cttacagtgtgggattttaataagaggctaaattgaaagatattgcccatcaattgtaacttcttaattaaaatataacaaaacagaacaaactatcaatttcatttctatgtcttattctttcatttcatgtggacacatatataccttttctttctcctataaag

SEQ ID NO: 854 - DNA, 208 bp, Unknown
  May be homo sapiens or mus musculus
atgttttaaattacatggctgtcctttagggatttgtttttcatactacaaggaaatatcgtccatgtagttggtgccaatgtgaaacttttctatgccacaagcctttttttgaaatcataagaaaatatacgtgtgtgagcttttcaaataatttctgttgtttttttgtcatttgcataataaataattggaaacaacttaaaag

SEQ ID NO: 855 - DNA, 200 bp, Unknown
  May be homo sapiens or mus musculus
acaatttagttatagttactcaaagtaaaggtatgaagaaccactggttttaaccctgcaagaatatatttactaaaagggtttttttaaagcaaaattaacatccaattggtagaataaatgggtgagatatttgtgaacagaaactcttcaacagtgtcccttgtttattcttctttatcatatactttctcatccag

SEQ ID NO: 856 - DNA, 194 bp, Unknown
  May be homo sapiens or mus musculus
taattccatttttaatccatttggaatgctgaaagctacaaaaatgtatttcctgtcagtaaacatttgttgttttatttttgtgtttaattaaaagtttatttttcccctttaaatctttgaaggaaagaaggtttttttgtttttttgtttgtttttgtcagaatagttcatggtaaactttgcaattacag

SEQ ID NO: 857 - DNA, 192 bp, Unknown
  May be homo sapiens or mus musculus
tctcttctggagatgtatatccatgtaactctgtatttcctcccatatctgactgtttgtttccaatcttttgactgctttcttgctttttatgcctttatctttgcttatttgaattaggtacttctctgctacctttcacctgctctttttctgtgccattgtttcccttgctaccttacctaaaaccag

SEQ ID NO: 858 - DNA, 179 bp, Unknown
  May be homo sapiens or mus musculus
ggccaagactgtgaatgtcatcttttcttttggcagaccaattttgcttttcctgttcatcacagactttcccttttggttaagtttctttatcggctttatttttgtttcctccctcaaacctcctctcccttttctttctgctcttttattacttctcttcccctcttcctctgcag

SEQ ID NO: 859 - DNA, 200 bp, Unknown
  May be homo sapiens or mus musculus
ttacagttctctgaactacagggaaacatgcatctcttactattgaacatatttagcttactaattttctgtattttgaatgtgtaactttgagtcagctatcattgttttttagggaaaatgtgtatgattaatttaaggtttttggagaatgcaatatgttagaaactatttggtttatgaaatttttgcatttctag

SEQ ID NO: 860 - DNA, 216 bp, Unknown
  May be homo sapiens or mus musculus
ttaaaatggaagaactgtcaggtactgttagtgcctgagcctttgcagcagtttgtttgataggtacaagagaactgatatgcctgttttctccagttctctttatctttctttagcagttctatttgaatgttttctatctattcgtactcatttttactccttctgacccttcttttctatttcccccttctctgccttgttcttctttttcag

SEQ ID NO: 861 - DNA, 200 bp, Unknown
  May be homo sapiens or mus musculus
ctcgtgactcacggcatgctgaatggttaatccagtagatctccaattttgaagctcctttttcttttatcctgtgtttatcccaaaatactctgtggctattttcctttgagctaatgtaacgttttcctctaacctatgacctttaacctctttacctctgacctaagcctcttgcatgcccaaatcctcttttatag

SEQ ID NO: 862 - DNA, 210 bp, Unknown
  May be homo sapiens or mus musculus
attaaatttataatttctgtggcattttttttctttttttttttttttttttttttttagcatttctgttttgttgtctgtgccagaatctagcacttacaggaacattagttctcttagctcctttgatggtcactgatttgttcttagagttaaaaaatcctctgctcatttttctcattcattttgcaccccctttcttctcttcag

SEQ ID NO: 863 - DNA, 178 bp, Unknown
  May be homo sapiens or mus musculus
ttgtacactctgggtctcggttccttgctctttgtgaccaatggagggggcagaaccaaacgcagtgtgaaaccaaagttcaccctgtggatcagctggcgacgctggggttctgtggaagacaatacctgaagcttacctatgttctttctttcactgctgctttggatgtactcag

SEQ ID NO: 864 - DNA, 225 bp, Unknown
  May be homo sapiens or mus musculus
ttagcagcttttgtaaagtacaataacaaatctccctcacaaatgagagaaactaaaaggacttgttaaataaaactccaaacttaagtctgcttctaggaattgtatttatttatcgtttcaagtatatcttttcatactgactatgagtaaagcaaagcaatagattgtttgaaagtctatagtttatgatgagctttgtcttttcttttcttcttacttcag

SEQ ID NO: 865 - DNA, 253 bp, Unknown
  May be homo sapiens or mus musculus
ttgtttgaatgctgatcaagaataaggtcttttgcatgctgcttctgggtagggaggttcctatctcatggcctcgccagggagatctttcatcagagatattgtcagctgcaactctgacagcagttaacatcgctttagctcttgtcactatttcattttgtcagctggctcactctgctctgtccttcacactagaaagaatgtacttaccaatgcgaactgtttctttctctattttgttctcactcag

SEQ ID NO: 866 - DNA, 155 bp, Unknown
  May be homo sapiens or mus musculus
agccaccgtgaagtgcctccacgcctcctccaggcagcctttggggctgacgcagcccagcctcgatctgtaccttgggggtctcccacatcctgcctcgtgcccggcggggctgcctcgggggcgtgcctgagccgggtctcttgtccccgcag

SEQ ID NO: 867 - DNA, 131 bp, Unknown
  May be homo sapiens or mus musculus
tcctctaatctttccgtcaatctcgtcgtgggtaaagatgcctttattaacagtagtgatgctgttggtttcgctcactaatggctttcttgtgcgctgtgtggctgtgtattttgtctgccattgtacag

SEQ ID NO: 868 - DNA, 211 bp, Unknown
  May be homo sapiens or mus musculus
caggataactttgtaaacctgctgagctaccatgaatcattatgttctatttgctgtactaactgccattctttcagattcaactaaaagttcattttgttaacttttcagtgatccatctttttatacttcccttcttcgtggttttatgtttccagcctttctgtgattatttttcctctctttctgcctctcttcttgctttctgaag

SEQ ID NO: 869 - DNA, 209 bp, Unknown
  May be homo sapiens or mus musculus
cccatctcctgcagatgagggtggcatctggagtcagggaggcttgatctggggcctgggtgtctgtcgctcgctgggtgccagttcctgcctgatgattctaaatctgggtgagtgcttgttgcttacaaaaagctgtagaacagaaaccatcacaacttgctgcttaccctcctgttctctccttttttttctttcttcttccccag

SEQ ID NO: 870 - DNA, 220 bp, Unknown
  May be homo sapiens or mus musculus
atctaacaacttaaataaattccctctgtcaaaaaaccagttactttcttaattagaagacatttcacatgacttgattaaaaagtgagttttgttctcttattaaattaatttacactttctggggattaatgaagggagaagaaacaattataaaatgagtaaagtttagaatgtcttcagtaaacactgttaagtaatttttacattttgtctacag

SEQ ID NO: 871 - DNA, 196 bp, Unknown
  May be homo sapiens or mus musculus
tattgtgttgtcttatctgtcctatgaattgtcatttgactcttccttttactttttatttcccctaactttcatgttatttccatctttaacacatatcatggacttacccctcccttcatctttagttcaaggaacatggtgaaacaagtatcttctgacagtgctttaccttattttctgggcctctgtgcag

SEQ ID NO: 872 - DNA, 203 bp, Unknown
  May be homo sapiens or mus musculus
tctctgctcgctctgctcgcagtcacagacacttgagcacacgcgtacacccagacatcttcgggctgctattggattgactttgaaggttctgtgtgggtcgccgtggctgcatgtttgaatcaggtggagaagcacttcaacgctggacgaagtaaagattattgttgttattttttttttctctctctctctctcttaag

SEQ ID NO: 873 - DNA, 208 bp, Unknown
  May be homo sapiens or mus musculus
cttcctttggaaggtggaacttggaaaacagccttactgtgataatgtgcttttcttccttttttgcccttcagcattcatcatcatatgactggctaacattattaataccttcttatcattttacaacaagcttctggaagaaagtgcatggtgtcagcttgcttgaaaataacattgctttgcttgttctactactctacattag

SEQ ID NO: 874 - DNA, 215 bp, Unknown
  May be homo sapiens or mus musculus
tgaaggcaatgtttcctttacgtactctgacatttccccagttatcctattgttttaattttcttttataaatgttcctaactttttttctttttaaaaaatagtatctctcccatctgtgttgtctcttcctctctttggctggctgtgattatttctgtaaatgacattggctgtgctctaatggctccatttgcaatctgtttcctttgaag

SEQ ID NO: 875 - DNA, 150 bp, Unknown
  May be homo sapiens or mus musculus
ccagtgcagttagggcctcatgtccccagccaatgactgaatgtccatcagcaatctagttctttgcccttttctcctatcccgtcttcattcctttgtcctccttcccttctcttttcccttcccctcttcctcccctgtgccatgcag

SEQ ID NO: 876 - DNA, 245 bp, Unknown
  May be homo sapiens or mus musculus
acctggtttcaattcttccagctctattttcctgcacagctcaggcagcaaactgaagagctctgtgctaccattgataaggtcttacaggattccttgtctatggtaatgctttagactagaatgtgcaattcaaacatttgctttgcttctcttcattttcctctactttagtatgatgcctcacaggcttgtccttttctttccttttctcttcttctttccttcctttctttttttttcag

SEQ ID NO: 877 - DNA, 189 bp, Unknown
  May be homo sapiens or mus musculus
tcttccaaatacatttttcttattgagccaatcccttgagtgcttcttttcctgatgcaacttttcttctaaaatgtgtgctaaaggccagatgtgagcaccctttgcatattcaactactgtactttgtttcttcttctgctaacagtattctttaatgtgattggtatcctgtgtcattttttctag

SEQ ID NO: 878 - DNA, 212 bp, Unknown
  May be homo sapiens or mus musculus
aatcttactccatgggctatagctaaatgtttttgaatgtttattttacctttgttagcactgagttttttctctaacaaatttatgagtaagaactaagtaaactgttcttaatctatagcatgatgttgttgggttctatgctgtgttaaaaaatgtatatattatagatagattctgcttcaataagcaattttaagttacttttccag

SEQ ID NO: 879 - DNA, 176 bp, Unknown
  May be homo sapiens or mus musculus
ggaggaacccgctgtgctctccaccatccccagctccatctccccagaggctgccctgcaggaggatgaacacccaaattatcacccagcatttcaggttcctgggccattctctgagtcagcccctaggcctgtgaggctgccacaccctgtgcccccgtgccttgcctccccag

SEQ ID NO: 880 - DNA, 237 bp, Unknown
  May be homo sapiens or mus musculus
atgagaagcccccactggggttttctaaggagaaaggaggcaaatgcttttccgtgtcaatcagtccaatcttgttttcactctcttgagcaaaggattctggaaccatctgtcacctaaactttaactctaatcttcttctgcttcctttgtctcttttcttcccttacctcgcccacccctcgtctgtgtccgcccacccctcccttcccctcgtctctaacccggtgctaacag

SEQ ID NO: 881 - DNA, 221 bp, Unknown
  May be homo sapiens or mus musculus
agggctctgctgccacctgcgtcctcagcggtgcttagcaggctatgcagctgtggccctgagagggccagcccagagaggcaagctgacccagcaagagaccttctcactgctgcagcaggacagcccccctctgaggcttgtgagggccaaggcctgggtcagggactcccacacatctcaaagctggacctcactctctcattgcctgccttttccag

SEQ ID NO: 882 - DNA, 193 bp, Unknown
  May be homo sapiens or mus musculus
gggtttctgtttctttctaccactacacttgctactgaaaccaagcagatgacttcatttctcttggattccactttctcacgtgtcagaatgggagaggaagggaggtgttgggataagtttcagttccactgtttgtacttctcgtctggctaacacccatgtggcaaataggtttcatcatttgtttcag

SEQ ID NO: 883 - DNA, 197 bp, Unknown
  May be homo sapiens or mus musculus
cagtttgtattcattgaagatatttttacattcttattttattgactcatgaactccatacctaccaaatattttgaattctatcatttagacctttttgcaatcaaggaaatatctgacgaaaattgattataggatagaacccgtacctatgttgacatgtactatgatgaattaccatttttctgttgcttcag

SEQ ID NO: 884 - DNA, 220 bp, Unknown
  May be homo sapiens or mus musculus
attacaggtgtgagtcactgtgcccagccatgtgtttagacttttaactaatctcttttttagtttcaagccttatcgtccgcctctgtagaccactcctgtgcctgtttcctgatccttccaagggccattgtattccctgtctgctgcccctcttttggattcttctgcacatttttttgttcatgcattcattcatttattgtttgattaatgacag

SEQ ID NO: 885 - DNA, 248 bp, Unknown
  May be homo sapiens or mus musculus
atagatgtgaattaatgtaaaaccataaacttttaagaaatggaagaaactactgacaaaataaatttgcaatttaatgttgtatcatgattccaaggatatctcttatgagctggtaaagataatagcctgtttctctcattgcatttcactttgatttttttttctcttttccatgtaaacataaatttctcttctcatatttctgtcttcatctccttgtttcttggtgtttcttctccctgaag

SEQ ID NO: 886 - DNA, 209 bp, Unknown
  May be homo sapiens or mus musculus
ctaacttatttaaataaagtcaaaacatgggatcctctttcttttttaatagaagaaatttttgctcaaactgaagataaatgccattgtgagttacagtaatgaatccccaaaaattcctcagcaggcctttaatctgatttcattataagctgttaaatttaagttgtaaaacagtttcttaacagttgcctgtttttatctgacag

SEQ ID NO: 887 - DNA, 242 bp, Unknown
  May be homo sapiens or mus musculus
gacatttactgcctatcagaaacggcaaatgatgtggagttgaaattattctaacaaaaatataacttttctaatatctgttgctgtttttctgttgaaaatgagcaggtagaatatacattgataggaaatgtgaaaatttttgcttgtgatcccttagtccgaagatagttctgccaggtaagttttcttaaaaatgtttttttctgtcctggcgcggtggctcacgcctgcaatcccag

SEQ ID NO: 888 - DNA, 178 bp, Unknown
  May be homo sapiens or mus musculus
aatacttttccccaccacctattttaagctagatttttggagggatatggtggggggtggtgatgtagttggatttatttaaacacacacatatataatgacaaaggaaataatagtatggctttttttctgtaaagtcaagcacttaccagtttttctctgctccttaattttatag

SEQ ID NO: 889 - DNA, 147 bp, Unknown
  May be homo sapiens or mus musculus
ctgtttgagatggagaacgtttttactgtgtcatcagatcctcatccctctcctgcagcccctccttcactttctttacccttatcttcatcttctacctcatctgggactaaaaaacaaaagaggaccccaacttatcagagatct

SEQ ID NO: 890 - DNA, 186 bp, Unknown
  May be homo sapiens or mus musculus
gctttcattttcactccatacccaagctggctagccttcctcaggcaccattgccctcagctccatccagcttcctgcctttcagccccactggccctctcctccttggctgctgtgagacaccagtggtctccttggctgaggctcagcaggagctacagatgctgcagaagcagttgggagaaa

SEQ ID NO: 891 - DNA, 48 bp, Unknown
  May be homo sapiens or mus musculus
gattataaatcattacattggagtgtgcttctctgtgcggatgaaatg

SEQ ID NO: 892 - DNA, 79 bp, Unknown
  May be homo sapiens or mus musculus
atgagctctatgcccagaaactgaagtacaaggccattagcgaggagctggaccacgccctcaatgacatgacctctat

SEQ ID NO: 893 - DNA, 171 bp, Unknown
  May be homo sapiens or mus musculus
aatttttaaggggccctgagatagctttgcttcgtaagcgcctgcaacaactgaggcttaagaaggctgagcagcagaggcagcaagagctagctgcacatacccagcaacagccttccacttctgatcagtcttctcatgagggctcttcacaggaccctcatgcttcag

SEQ ID NO: 894 - DNA, 123 bp, Unknown
  May be homo sapiens or mus musculus
gtcccctgaagtcatgggttgctggctcctgctcagagtgacagcaccctgtggagtctgctggtactgacctaaccaccacagagccccactggagcatggagccagcctagagagggtcag

SEQ ID NO: 895 - DNA, 33 bp, Unknown
  May be homo sapiens or mus musculus
ttctgaaactgagtccctaaccaagctggaccg

SEQ ID NO: 896 - DNA, 113 bp, Unknown
  May be homo sapiens or mus musculus
atctattgatgctatccctgacaaccaaaagtttaagcagttgcagagggagctctctcaagtgctgacccagcgccagatctacatccagcctgataattaagccgatccag

SEQ ID NO: 897 - DNA, 57 bp, Unknown
  May be homo sapiens or mus musculus
gtggaaaaaacccacatcgaggtgacagtacccacctcaaatggtgaccaaacacag

SEQ ID NO: 898 - DNA, 101 bp, Unknown
  May be homo sapiens or mus musculus
tttcagaaacaactctccaagttccatttccaaggaaagtcttaaccatttgtcccttctggcgtaccctctttcattgaaatccatgcagaatataccag

SEQ ID NO: 899 - DNA, 39 bp, Unknown
  May be homo sapiens or mus musculus
gaccagagtaatgcggagaagcacgcagatggaatgata

SEQ ID NO: 900 - DNA, 141 bp, Unknown
  May be homo sapiens or mus musculus
acagctcccgagggctcctttgcctctgctgacgccctcctcagcaggctagctcaccccgtctctctctgtggtgcacttgactatctggagcccgacttagcagaaaagaaccccccactattcgctcagaaactccag

SEQ ID NO: 901 - DNA, 27 bp, Unknown
  May be homo sapiens or mus musculus
cctataaatgagaagccatctggagag

SEQ ID NO: 902 - DNA, 105 bp, Unknown
  May be homo sapiens or mus musculus
agagaggatgcaagccatggagaaacagattgccagtttaactggccttgttcagtctgcgctttttaaagggcccattacaagttatagcaaagatgcgtctag

SEQ ID NO: 903 - DNA, 36 bp, Unknown
  May be homo sapiens or mus musculus
ggcatttttggcagttggagaacaaagcaatccaag

SEQ ID NO: 904 - DNA, 96 bp, Unknown
  May be homo sapiens or mus musculus
tgaacctatccccgcttcgtgttctgggggcacccaccctgtaatggcgagacttcctagccccactgtagctaggagcgctgtgcagcctgccag

SEQ ID NO: 905 - DNA, 30 bp, Unknown
  May be homo sapiens or mus musculus
cctcacaggctgtggaccctggccgagcag

SEQ ID NO: 906 - DNA, 51 bp, Unknown
  May be homo sapiens or mus musculus
gtcaaaagtccgggtgcggctcctacacggatgactgcctgctgttataag

SEQ ID NO: 907 - DNA, 66 bp, Unknown
  May be homo sapiens or mus musculus
atcaatacagattctttttcttcctatcctgttttctctcctgtttctttggattatagcagtgaa

SEQ ID NO: 908 - DNA, 29 bp, Unknown
  May be homo sapiens or mus musculus
tgcaacaaggatgaatagaatgggccaag

SEQ ID NO: 909 - DNA, 37 bp, Unknown
  May be homo sapiens or mus musculus
ggattaatgaaaatcaagttccatcctcagacaagag

SEQ ID NO: 910 - DNA, 102 bp, Unknown
  May be homo sapiens or mus musculus
actaatctagacaaagatctcagcctctgccagacagagttagaggcagatttagaaaaaatggagacgcttaataaagcacccagtgcaaacgtgccacag

SEQ ID NO: 911 - DNA, 66 bp, Unknown
  May be homo sapiens or mus musculus
cctcccaaaaagatatgggattatactcctggagactgctctatccttcctagagaggatagaaag

SEQ ID NO: 912 - DNA, 75 bp, Unknown
  May be homo sapiens or mus musculus
acactcctgaagaaaacccttatttccctacgtacaaattccctgaacttcctgaaatccagcaaacttccgaag

SEQ ID NO: 913 - DNA, 96 bp, Unknown
  May be homo sapiens or mus musculus
caactgccgaccctttacgcgcacgctctatttctgctgttaaaatcattcctgtgaagacagtgaaaaacgcctcaggcctagttctccctacag

SEQ ID NO: 914 - DNA, 96 bp, Unknown
  May be homo sapiens or mus musculus
gtgatgctgagccctgccatgcaaggggtcatcctggccatagctaaagcccgtcagacctttgaccgagatgggtctgaagcagggctgattaag

SEQ ID NO: 915 - DNA, 33 bp, Unknown
  May be homo sapiens or mus musculus
acacaacggcgacgacagaaccagcagttcacg

SEQ ID NO: 916 - DNA, 126 bp, Unknown
  May be homo sapiens or mus musculus
aataaactactctctaaaggcctgtctcatactcatcctccatctcctccctctcgccttccgtctcctgatccagctgcttcttcctctccatcaactgttgactctgcttctcctgccagaaag

SEQ ID NO: 917 - DNA, 42 bp, Unknown
  May be homo sapiens or mus musculus
atagtttcaaacaaaagcatacctcgaaagcgccccagagag

SEQ ID NO: 918 - DNA, 71 bp, Unknown
  May be homo sapiens or mus musculus
gcaatgtatcaggaacacagaggttggattctgctacagtcaggacttactcctgctaaagtctcctgttg

SEQ ID NO: 919 - DNA, 27 bp, Unknown
  May be homo sapiens or mus musculus
agtttcagttcctgcattcagcttatg

SEQ ID NO: 920 - DNA, 33 bp, Unknown
  May be homo sapiens or mus musculus
atcgtggccggagtgtcagtgcccccgtattag

SEQ ID NO: 921 - DNA, 43 bp, Unknown
  May be homo sapiens or mus musculus
tcattgcacaataaggatttttgaatgtataatatcatctaag

SEQ ID NO: 922 - DNA, 105 bp, Unknown
  May be homo sapiens or mus musculus
acgcagaccaaactggagcatgcccgcattaaggagcttgaacagagcctgctctttgaaaagaccaaagctgacaaactccagagggagttagaagacactagg

SEQ ID NO: 923 - DNA, 48 bp, Unknown
  May be homo sapiens or mus musculus
aaagcaagacagatctcattggctgtcacaagtgcagttcctgtacag

SEQ ID NO: 924 - DNA, 39 bp, Unknown
  May be homo sapiens or mus musculus
gtctgatgaaagtgactcctctctctcggaggtacacag

SEQ ID NO: 925 - DNA, 129 bp, Unknown
  May be homo sapiens or mus musculus
ctcagattctggaacttcagaggctagtctttcacctccttcttccccaccaagccggccccgtaatgaactgaatgtttttaatcgtcttactgtttctcagggaaacacatcagttcagcaggataa

SEQ ID NO: 926 - DNA, 132 bp, Unknown
  May be homo sapiens or mus musculus
gcacggccagggtggagctctgtgcacagggctcagcggacctggcacacctggacgacggtccctacgaggcggggggagagaaggagcaggacccccgcctcatcccggtccctgccaacagctactttg

SEQ ID NO: 927 - DNA, 62 bp, Unknown
  May be homo sapiens or mus musculus
actatgaactgctgggagataagaccatctgatttatccgtgtacatacagcagctagcaca

SEQ ID NO: 928 - DNA, 87 bp, Unknown
  May be homo sapiens or mus musculus
atggatgtagtgaatgctttccagagtggaagttccattcagggggctctaaggcggcaaccctccatcgccagccagcatcatgat

SEQ ID NO: 929 - DNA, 165 bp, Unknown
  May be homo sapiens or mus musculus
caatctttcgtcagttcgacgcatgtacaaggagagtaattcttcctccagtcttccaagtcttcacacttccttctctgccccttccttcactgccccctctttcctgaaaagcttttaccagaattcaggtagactgtccccacagtatgaaaatgaaatcag

SEQ ID NO: 930 - DNA, 57 bp, Unknown
  May be homo sapiens or mus musculus
catctgaatccatttctttgaaaaacttaaaaaggcgatcacaattttttgaacaag

SEQ ID NO: 931 - DNA, 42 bp, Unknown
  May be homo sapiens or mus musculus
ggtcatcaggcttttcttacagttcatgggtctacctctgtg

SEQ ID NO: 932 - DNA, 141 bp, Unknown
  May be homo sapiens or mus musculus
gttcccagtgcccccgacaagcccctgctggtgtctccatctcctgccaagcatcctccagtgcctcctcctgtgggcctggcctcagggctatggacagactcctgtcccatcccagagacccctcgtgatcgtgccctg

SEQ ID NO: 933 - DNA, 141 bp, Unknown
  May be homo sapiens or mus musculus
ccatgagaagccgatccattggtgaatgtgctctgccatcggcctatatacgcagtgctaaaagtgctcctgttctgatccatacttccaaacccttcttgcctgatattgttctcactcccctttctgatgagctttcag

SEQ ID NO: 934 - DNA, 51 bp, Unknown
  May be homo sapiens or mus musculus
gcaactctccagaagcatactttcatggttttccttcccttttttcagtta

SEQ ID NO: 935 - DNA, 151 bp, Unknown
  May be homo sapiens or mus musculus
cctgaccaagaaggcgtcaccataccagatctggggagtctctcctcacctctgatagacacagagaggaatctgggcctgcttctcggattacacgcttcctatttagcaatgagcacaccgctgtctcctgtcgagattgaatgtgcca

SEQ ID NO: 936 - DNA, 87 bp, Unknown
  May be homo sapiens or mus musculus
cattacctggccaggaatttctacaacctgaggttccttgctctgtttgtagccttcgctatcaacttcatcctgcttttttataag

SEQ ID NO: 937 - DNA, 168 bp, Unknown
  May be homo sapiens or mus musculus
acatggaggtatcttcatcttctgttaccacaatggcaagtatcccagaaatcacacctaaagtgattgatacctggagacctaaactgacaagctctcggaaatttgtagttcaagatgatccaaacacttctgattttactgatcctttatcgggtatcccaaagg

SEQ ID NO: 938 - DNA, 39 bp, Unknown
  May be homo sapiens or mus musculus
cgagccatgtcctccaaccgatgagcaattggttgcagg

SEQ ID NO: 939 - DNA, 107 bp, Unknown
  May be homo sapiens or mus musculus
aacgtattttcagcagcattttgaagcacccctggcgtgcactgcacagggaaaccaggaccacattggtgtgctgtgtcctccttaccaactggctcttggagaag

SEQ ID NO: 940 - DNA, 98 bp, Unknown
  May be homo sapiens or mus musculus
ggctggagactctgaaagacacaccgcccccacggctcatcaagtcacacctgcccctggctctgctccctcagactctgttggatcagaaggtcaag

SEQ ID NO: 941 - DNA, 39 bp, Unknown
  May be homo sapiens or mus musculus
ttgcgtacttgaaggaccgaaggctgagtggaggagcag

SEQ ID NO: 942 - DNA, 87 bp, Unknown
  May be homo sapiens or mus musculus
acttttctgtcctcggcccagaagagaggtagaggtggggagtctgacctggagcccatagacagctggcttataacccaaggaatg

SEQ ID NO: 943 - DNA, 38 bp, Unknown
  May be homo sapiens or mus musculus
tacgatgccaactgttaagcctgcaggaatcctcctgg

SEQ ID NO: 944 - DNA, 69 bp, Unknown
  May be homo sapiens or mus musculus
gtcacgagcatgatttccgagttaagcacctgtccgaggccttgaacgacaagcacgggccgctggccg

SEQ ID NO: 945 - DNA, 153 bp, Unknown
  May be homo sapiens or mus musculus
ggcttcttccctgtaccccaaggggcggcctgcctggcccctggataaacgctgcttgtgtttgtgcggccgacatctcgccaggtcacgagcatgatttccgagttaagcacctgtccgaggccttgaacgacaagcacgggccgctggccg

SEQ ID NO: 946 - DNA, 49 bp, Unknown
  May be homo sapiens or mus musculus
gtcagcttgcaaggttgaatgcaatatccttttatcacactcctctcaa

SEQ ID NO: 947 - DNA, 123 bp, Unknown
  May be homo sapiens or mus musculus
actaagcagtcttctggggaaaagctcatggatggctctgaaatcttcagtttattagagtctgcgcgaaaaccaacagaattcataggaggggttacttctacttctcaaagctgggttcag

SEQ ID NO: 948 - DNA, 120 bp, Unknown
  May be homo sapiens or mus musculus
cttgcagaagatggtgcgtccggatcagccacaaacagtaacaaccatctaatcgagcctcagatccgccggcctcgtagcctcagctcgccaacagtaactttatctgccccgctggag

SEQ ID NO: 949 - DNA, 80 bp, Unknown
  May be homo sapiens or mus musculus
ggttaccctcgatccctctaaacggcagaactctaaccgctgtgtttcgggcgcctctctgccccagggatccaagatca

SEQ ID NO: 950 - DNA, 27 bp, Unknown
  May be homo sapiens or mus musculus
gagaccaaggagatcagctgggagcag

SEQ ID NO: 951 - DNA, 108 bp, Unknown
  May be homo sapiens or mus musculus
cacggagcagccgtatccctcgacccagcatgagtcaggggtgcagccgcgataccagccgtgagagcagccgagatacaagccctgctcggggctttcctccacttg

SEQ ID NO: 952 - DNA, 45 bp, Unknown; identical to SEQ ID NO: 37
  May be homo sapiens or mus musculus

SEQ ID NO: 953 - DNA, 60 bp, Unknown
  May be homo sapiens or mus musculus
gacgctgcattgggatacagatccatcagttcttcagcttcactcagattccgatttggg

SEQ ID NO: 954 - DNA, 129 bp, Unknown
  May be homo sapiens or mus musculus
attttcacatttcacacgaaactcgtattcaagaccttcaataaggtttttcactgaaaagacagtttctcgaatttcttctgttgtcacagaaatccatttattctgcttcttctcacgcttctcaag

SEQ ID NO: 955 - DNA, 72 bp, Unknown
  May be homo sapiens or mus musculus
gaactcaatgagttaaaggaccagattcaggatgtagaaggcaaatacatgcagggattgaaagagatgaag

SEQ ID NO: 956 - DNA, 27 bp, Unknown
  May be homo sapiens or mus musculus
ccaacactgtgcctggaggacccaaat

SEQ ID NO: 957 - DNA, 135 bp, Unknown
  May be homo sapiens or mus musculus
cttcctggtggccgacttcaggcggcggggcgtggacgtgtctcaggtggcctggcagagcaagggggacacccccagctcctgctgcatcatcaacaactccaatggcaaccgtaccattgtgctccatgacac

SEQ ID NO: 958 - DNA, 107 bp, Unknown
  May be homo sapiens or mus musculus
caaaacaatatcagtcaaggtaattgatgatgaggagtatgagaaaaacaagaccttcttccttgagattggagagccccgcctggtggagatgagtgagaagaaag

SEQ ID NO: 959 - DNA, 54 bp, Unknown
  May be homo sapiens or mus musculus
ctaggactcagattggatcaaaattcacacggtggggatcacagggagaaagag

SEQ ID NO: 960 - DNA, 93 bp, Unknown
  May be homo sapiens or mus musculus
aagcatcctcatcttctataagggagcgaccacctgaagaagttgcagctcgccttgcacaacaggaaaaacaagaacaagttaaaattgagt

SEQ ID NO: 961 - DNA, 57 bp, Unknown
  May be homo sapiens or mus musculus
gaagttatcaaggaggatgctgctgaggggctttcttcacccacagactcctcgagg

SEQ ID NO: 962 - DNA, 78 bp, Unknown
  May be homo sapiens or mus musculus
cacagtttgctgcttttctgaaacaaaatatgctggtgaggaaagctcttcctcctggcacctcctcctgtctctttg

SEQ ID NO: 963 - DNA, 189 bp, Unknown
  May be homo sapiens or mus musculus
caaagatcacctgtctattctggatttgtgtttccttccgctctttctcctcatcctatcactcaacatacatcagccccatggcctgaattcatggctacatctgtcgatcctttacctttaaatgacacacctcctcctttaccagctaagaaacacagaaggcagcagcagcagcaggagcaacag

SEQ ID NO: 964 - DNA, 36 bp, Unknown
  May be homo sapiens or mus musculus
gagcaattagtaattccaaaagttcaagtatcaaag

SEQ ID NO: 965 - DNA, 150 bp, Unknown
  May be homo sapiens or mus musculus
agctccccacgatgagatggtgctgtgctggctctgcagtttctctctcttcagtcccattttccggaagtgtgatatgcgtctttatctggtttttccatgcctttttctcaaatagtatctactctctccttttctcttccttctcag

SEQ ID NO: 966 - DNA, 81 bp, Unknown
  May be homo sapiens or mus musculus
atgatagtgaaaaaaaaccccagcgacgcaatcgtagccgcaggcgtcgcttcaggggtcaggcagaagatagacagccag

SEQ ID NO: 967 - DNA, 102 bp, Unknown
  May be homo sapiens or mus musculus
gccctagagaaacagaaagaatacattgcctgccttaggaatgagcgagatatgctcagagaggagctggctgacctgcaggagacagtgaagacgggagag

SEQ ID NO: 968 - DNA, 93 bp, Unknown
  May be homo sapiens or mus musculus
gagaagcagcgcatgcagcagaaaatagacaccatgacaaaagaggtgtttgacctccaggagacacttctttggaaagataaaaaaattggg

SEQ ID NO: 969 - DNA, 51 bp, Unknown
  May be homo sapiens or mus musculus
tactctcttcattcctttgatcggaagtggggacagattcagaagtggctg

SEQ ID NO: 970 - DNA, 117 bp, Unknown
  May be homo sapiens or mus musculus
ttttgaatatactaacactgaatcagcacttctaaagcccttccttctcccactggcttcacttggctttcagacataatgaggagactggcttttcgaggcgctggttgtgctctg

SEQ ID NO: 971 - DNA, 69 bp, Unknown
  May be homo sapiens or mus musculus
ggaaaaagagagaaatgtatgagcatcctgtcttctgcttggcctcccaagtgatggatttaaccattc

SEQ ID NO: 972 - DNA, 30 bp, Unknown
  May be homo sapiens or mus musculus
ctactgttgaggctattgaggctgatgaag

SEQ ID NO: 973 - DNA, 99 bp, Unknown
  May be homo sapiens or mus musculus
taaacttcacctgccaacggctcctcccccacttaatgagggagaaagtttggtcagccgcattcttcagctggggcctcctggaaccaaattccttgg

SEQ ID NO: 974 - DNA, 92 bp, Unknown
  May be homo sapiens or mus musculus
gctttgagttacacaggtagccacatgaaagtccacttacccagtttagtagagaatgaaatcctgaaagaggatggatcaataattaaaag

SEQ ID NO: 975 - DNA, 42 bp, Unknown
  May be homo sapiens or mus musculus
gagccccaaactactgtaatccacaaccctgatggaaacaag

SEQ ID NO: 976 - DNA, 151 bp, Unknown
  May be homo sapiens or mus musculus
tcctggatcagtgagagtgtggaggccgacgtgcgcctccgcctggccaatgtgtcggagcgggacgggggcgagtacctctgtcgagccaccaatttcataggcgtggccgagaaggccttttggctgagcgttcacgggccccgagcag

SEQ ID NO: 977 - DNA, 188 bp, Unknown
  May be homo sapiens or mus musculus
gaattcaaacccattggtaccgcgcacaacagaagggcccagccttttgttgcagctgcaaacattgatgacaaaagacaggtagtgagcgcttcctataactcgccaattgggctctattcaactagcaatatacaagatgcgcttcacggacagctgcggggtctcattcctagctcacctcaaaa

SEQ ID NO: 978 - DNA, 45 bp, Unknown
  May be homo sapiens or mus musculus
ccatgtccctgaacctgaggattatggctgctctcctgatgaatg

SEQ ID NO: 979 - DNA, 54 bp, Unknown
  May be homo sapiens or mus musculus
acactggcgtaaaagataacatctataggaaaccccctatctacagacagcatg

SEQ ID NO: 980 - DNA, 39 bp, Unknown
  May be homo sapiens or mus musculus
aaaaccagtctatccaagaccaggcacctatgttggaag

SEQ ID NO: 981 - DNA, 60 bp, Unknown
  May be homo sapiens or mus musculus
aacacctacacctctataggtgctggtccgtttcctctgtggaatttctaggctccagtg

SEQ ID NO: 982 - DNA, 45 bp, Unknown
  May be homo sapiens or mus musculus
aaaggaaaatatcccaaggactaatctgatcgggtcttccttcat

SEQ ID NO: 983 - DNA, 132 bp, Unknown
  May be homo sapiens or mus musculus
gggagaatttcgatcgccaggccagccttcggcggtctctaatttacacagacactctggtaagacgaccgaagaaagtcaaaaggagaaagactattacaggagtccctgacaacatacagaaggagctag

SEQ ID NO: 984 - DNA, 100 bp, Unknown
  May be homo sapiens or mus musculus
cggtgttgggcctgcttgccgcgggagtgacgctacttcttccagagaccaagggggtcgctttgccagagaccatgaaggacgccgagaaccttgggag

SEQ ID NO: 985 - DNA, 151 bp, Unknown
  May be homo sapiens or mus musculus
gagggtcccccccagctgaccagaccctggtcatcaagacattccgcttcctgtcacagaaactctttatctccgtctcagttctctccagcctgggcattgtcctagctgttgtctgtctgtcctttaacatctacaactcacatgtccg

SEQ ID NO: 986 - DNA, 60 bp, Unknown
  May be homo sapiens or mus musculus
cattcttctgattctccttcaaggtccccaaagacattgttgggttctgacacagtcaaa

SEQ ID NO: 987 - DNA, 72 bp, Unknown
  May be homo sapiens or mus musculus
ttcatcatcatgggagtaaaatgttacgttcggaatcaaactcttcaattactactactcagcctactatag

SEQ ID NO: 988 - DNA, 27 bp, Unknown
  May be homo sapiens or mus musculus
cttggattcctatccggtaacttctaa

SEQ ID NO: 989 - DNA, 99 bp, Unknown
  May be homo sapiens or mus musculus
gcgtgtgaccccctgccgcacgaggaggagccctctgaagtgccacagctgcgccagccctacgctcctccccggcccggcgcccgccccacacactgg

SEQ ID NO: 990 - DNA, 75 bp, Unknown; identical to SEQ ID NO: 23
  May be homo sapiens or mus musculus

SEQ ID NO: 991 - DNA, 45 bp, Unknown
  May be homo sapiens or mus musculus
ttcgtctgagcaaaactcagtccgagccttccctgagctgtcaag

SEQ ID NO: 992 - DNA, 112 bp, Unknown
  May be homo sapiens or mus musculus
cttagatttgttgacagcggtttcctggagtgctgtcttgagaacgattctgaggaggctcagcaagaaagagtgtttcagttgattgggtgtgtctgtcatggagaaggaa

SEQ ID NO: 993 - DNA, 57 bp, Unknown
  May be homo sapiens or mus musculus
cctattggtgtaggtataccaacaattaatttaagaaaaaggagacccaatatccag

SEQ ID NO: 994 - DNA, 108 bp, Unknown
  May be homo sapiens or mus musculus
ggtcttgctttgtctcccaggctggtgtgcagtggtgcgaccacggctcacggcagcctcagccacccagatgtaagcgatctggttcccacctcagcctcccgagta

SEQ ID NO: 995 - DNA, 27 bp, Unknown
  May be homo sapiens or mus musculus
atcactacattccaagctatcagaaag

SEQ ID NO: 996 - DNA, 33 bp, Unknown
  May be homo sapiens or mus musculus
tgtccatgttacttcactgaagaaacatacaag

SEQ ID NO: 997 - DNA, 67 bp, Unknown
  May be homo sapiens or mus musculus
cactttgggaggccgaggcgggcagatcacttgaggccaggagttccagaccagcctggccaacatg

SEQ ID NO: 998 - DNA, 95 bp, Unknown
  May be homo sapiens or mus musculus
agccagaatgaagaatggggaggtttgtctgaggatatcttatgataaagagcagtctaaggctttagtccctttgatccccaacttatttattg

SEQ ID NO: 999 - DNA, 9 bp, Unknown
  May be homo sapiens or mus musculus
tctgtaagt

SEQ ID NO: 1000 - DNA, 9 bp, Unknown
  May be homo sapiens or mus musculus
aaagtgagc

SEQ ID NO: 1001 - DNA, 9 bp, Unknown
  May be homo sapiens or mus musculus
atggtgggt

SEQ ID NO: 1002 - DNA, 9 bp, Unknown
  May be homo sapiens or mus musculus
tatgtaact

SEQ ID NO: 1003 - DNA, 9 bp, Unknown
  May be homo sapiens or mus musculus
caggttatt

SEQ ID NO: 1004 - DNA, 9 bp, Unknown
  May be homo sapiens or mus musculus
caggtagga

SEQ ID NO: 1005 - DNA, 9 bp, Unknown
  May be homo sapiens or mus musculus
ccggttagt

SEQ ID NO: 1006 - DNA, 9 bp, Unknown
  May be homo sapiens or mus musculus
caggtaccc

SEQ ID NO: 1007 - DNA, 9 bp, Unknown
  May be homo sapiens or mus musculus
caggtttgt

SEQ ID NO: 1008 - DNA, 9 bp, Unknown
  May be homo sapiens or mus musculus
caggtactc

SEQ ID NO: 1009 - DNA, 9 bp, Unknown
  May be homo sapiens or mus musculus
atagtaagt

SEQ ID NO: 1010 - DNA, 9 bp, Unknown
  May be homo sapiens or mus musculus
caggtttgt

SEQ ID NO: 1011 - DNA, 9 bp, Unknown
  May be homo sapiens or mus musculus
gaggtatga

SEQ ID NO: 1012 - DNA, 9 bp, Unknown
  May be homo sapiens or mus musculus
taggtaaaa

SEQ ID NO: 1013 - DNA, 9 bp, Unknown
  May be homo sapiens or mus musculus
aaggtaaac

SEQ ID NO: 1014 - DNA, 9 bp, Unknown
  May be homo sapiens or mus musculus
caggtactg

SEQ ID NO: 1015 - DNA, 9 bp, Unknown
  May be homo sapiens or mus musculus
caggtaggg

SEQ ID NO: 1016 - DNA, 9 bp, Unknown
  May be homo sapiens or mus musculus
aaggtaaaa

SEQ ID NO: 1017 - DNA, 9 bp, Unknown
  May be homo sapiens or mus musculus
gaagtgagt

SEQ ID NO: 1018 - DNA, 9 bp, Unknown
  May be homo sapiens or mus musculus
aaggtatga

SEQ ID NO: 1019 - DNA, 9 bp, Unknown
  May be homo sapiens or mus musculus
gaggtaaag

SEQ ID NO: 1020 - DNA, 9 bp, Unknown
  May be homo sapiens or mus musculus
caggtattt

SEQ ID NO: 1021 - DNA, 9 bp, Unknown
  May be homo sapiens or mus musculus
aaggtaatt

SEQ ID NO: 1022 - DNA, 9 bp, Unknown
  May be homo sapiens or mus musculus
aaggtacca

SEQ ID NO: 1023 - DNA, 9 bp, Unknown
  May be homo sapiens or mus musculus
caggtatct

SEQ ID NO: 1024 - DNA, 9 bp, Unknown
  May be homo sapiens or mus musculus
aaggtatct

SEQ ID NO: 1025 - DNA, 9 bp, Unknown
  May be homo sapiens or mus musculus
acggttggt

SEQ ID NO: 1026 - DNA, 9 bp, Unknown
  May be homo sapiens or mus musculus
aaggtagtt

SEQ ID NO: 1027 - DNA, 9 bp, Unknown
  May be homo sapiens or mus musculus
gaggtagct

SEQ ID NO: 1028 - DNA, 9 bp, Unknown
  May be homo sapiens or mus musculus
ttggtgagt

SEQ ID NO: 1029 - DNA, 9 bp, Unknown
  May be homo sapiens or mus musculus
atggtagga

SEQ ID NO: 1030 - DNA, 9 bp, Unknown
  May be homo sapiens or mus musculus
taggtactg

SEQ ID NO: 1031 - DNA, 9 bp, Unknown
  May be homo sapiens or mus musculus
aaggtaagc

SEQ ID NO: 1032 - DNA, 9 bp, Unknown
  May be homo sapiens or mus musculus
agggtaatg

SEQ ID NO: 1033 - DNA, 9 bp, Unknown
  May be homo sapiens or mus musculus
caggtgagc

SEQ ID NO: 1034 - DNA, 9 bp, Unknown
  May be homo sapiens or mus musculus
caggtactt

SEQ ID NO: 1035 - DNA, 9 bp, Unknown
  May be homo sapiens or mus musculus
taagtaagt

SEQ ID NO: 1036 - DNA, 9 bp, Unknown
  May be homo sapiens or mus musculus
ttggtaggg

SEQ ID NO: 1037 - DNA, 9 bp, Unknown
  May be homo sapiens or mus musculus
acagtgagt

SEQ ID NO: 1038 - DNA, 9 bp, Unknown
  May be homo sapiens or mus musculus
gatgtaaca

SEQ ID NO: 1039 - DNA, 9 bp, Unknown
  May be homo sapiens or mus musculus
caggtgaga

SEQ ID NO: 1040 - DNA, 9 bp, Unknown
  May be homo sapiens or mus musculus
aaggtaaac

SEQ ID NO: 1041 - DNA, 9 bp, Unknown
  May be homo sapiens or mus musculus
gtggtaatg

SEQ ID NO: 1042 - DNA, 9 bp, Unknown
  May be homo sapiens or mus musculus
ctggtgggt

SEQ ID NO: 1043 - DNA, 9 bp, Unknown
  May be homo sapiens or mus musculus
caggtagtg

SEQ ID NO: 1044 - DNA, 9 bp, Unknown
  May be homo sapiens or mus musculus
ttagtaagt

SEQ ID NO: 1045 - DNA, 9 bp, Unknown
  May be homo sapiens or mus musculus
ccagtaaga

SEQ ID NO: 1046 - DNA, 9 bp, Unknown
  May be homo sapiens or mus musculus
aaggtgata

SEQ ID NO: 1047 - DNA, 9 bp, Unknown
  May be homo sapiens or mus musculus
agggtaagg

SEQ ID NO: 1048 - DNA, 9 bp, Unknown
  May be homo sapiens or mus musculus
agggtaaga

SEQ ID NO: 1049 - DNA, 9 bp, Unknown
  May be homo sapiens or mus musculus
aaggtgaga

SEQ ID NO: 1050 - DNA, 9 bp, Unknown
  May be homo sapiens or mus musculus
aaggtgagg

SEQ ID NO: 1051 - DNA, 9 bp, Unknown
  May be homo sapiens or mus musculus
caggtagcc

SEQ ID NO: 1052 - DNA, 9 bp, Unknown
  May be homo sapiens or mus musculus
atggtgagg

SEQ ID NO: 1053 - DNA, 9 bp, Unknown
  May be homo sapiens or mus musculus
tgggtattt

SEQ ID NO: 1054 - DNA, 9 bp, Unknown
  May be homo sapiens or mus musculus
ccggtgagt

SEQ ID NO: 1055 - DNA, 9 bp, Unknown
  May be homo sapiens or mus musculus
ccggtgagt

SEQ ID NO: 1056 - DNA, 9 bp, Unknown
  May be homo sapiens or mus musculus
caagtaagt

SEQ ID NO: 1057 - DNA, 9 bp, Unknown
  May be homo sapiens or mus musculus
caggtggcc

SEQ ID NO: 1058 - DNA, 9 bp, Unknown
  May be homo sapiens or mus musculus
gaggtgaga

SEQ ID NO: 1059 - DNA, 9 bp, Unknown
  May be homo sapiens or mus musculus
tcagtaagt

SEQ ID NO: 1060 - DNA, 9 bp, Unknown
  May be homo sapiens or mus musculus
caggtaggg

SEQ ID NO: 1061 - DNA, 9 bp, Unknown
  May be homo sapiens or mus musculus
ttggtgagt

SEQ ID NO: 1062 - DNA, 9 bp, Unknown
  May be homo sapiens or mus musculus
caggtaccg

SEQ ID NO: 1063 - DNA, 9 bp, Unknown
  May be homo sapiens or mus musculus
ggggtattg

SEQ ID NO: 1064 - DNA, 9 bp, Unknown
  May be homo sapiens or mus musculus
aaggtagta

SEQ ID NO: 1065 - DNA, 9 bp, Unknown
  May be homo sapiens or mus musculus
aaggtacca

SEQ ID NO: 1066 - DNA, 9 bp, Unknown
  May be homo sapiens or mus musculus
aatgtgtgt

SEQ ID NO: 1067 - DNA, 9 bp, Unknown
  May be homo sapiens or mus musculus
cacgtaagg

SEQ ID NO: 1068 - DNA, 9 bp, Unknown
  May be homo sapiens or mus musculus
aaggtgggg

SEQ ID NO: 1069 - DNA, 9 bp, Unknown
  May be homo sapiens or mus musculus
gaggtggga

SEQ ID NO: 1070 - DNA, 9 bp, Unknown
  May be homo sapiens or mus musculus
agtgtatgt

SEQ ID NO: 1071 - DNA, 9 bp, Unknown
  May be homo sapiens or mus musculus
agggtaatg

SEQ ID NO: 1072 - DNA, 9 bp, Unknown
  May be homo sapiens or mus musculus
ttggtgagt

SEQ ID NO: 1073 - DNA, 9 bp, Unknown
  May be homo sapiens or mus musculus
caggtaatt

SEQ ID NO: 1074 - DNA, 9 bp, Unknown
  May be homo sapiens or mus musculus
aaggtaaat

SEQ ID NO: 1075 - DNA, 9 bp, Unknown
  May be homo sapiens or mus musculus
caggtatgc

SEQ ID NO: 1076 - DNA, 9 bp, Unknown
  May be homo sapiens or mus musculus
caggtaact

SEQ ID NO: 1077 - DNA, 9 bp, Unknown
  May be homo sapiens or mus musculus
gaggtatgt

SEQ ID NO: 1078 - DNA, 9 bp, Unknown
  May be homo sapiens or mus musculus
ggggtatga

SEQ ID NO: 1079 - DNA, 9 bp, Unknown
  May be homo sapiens or mus musculus
ctggtaggc

SEQ ID NO: 1080 - DNA, 9 bp, Unknown
  May be homo sapiens or mus musculus
ctggtaaag

SEQ ID NO: 1081 - DNA, 9 bp, Unknown
  May be homo sapiens or mus musculus
ttcgtgagt

SEQ ID NO: 1082 - DNA, 9 bp, Unknown
  May be homo sapiens or mus musculus
aaggtaaat

SEQ ID NO: 1083 - DNA, 9 bp, Unknown
  May be homo sapiens or mus musculus
tgggtagga

SEQ ID NO: 1084 - DNA, 9 bp, Unknown
  May be homo sapiens or mus musculus
aaggtttgg

SEQ ID NO: 1085 - DNA, 9 bp, Unknown
  May be homo sapiens or mus musculus
aaggtattc

SEQ ID NO: 1086 - DNA, 9 bp, Unknown
  May be homo sapiens or mus musculus
caggtaacg

SEQ ID NO: 1087 - DNA, 9 bp, Unknown
  May be homo sapiens or mus musculus
aaagtaagt

SEQ ID NO: 1088 - DNA, 9 bp, Unknown
  May be homo sapiens or mus musculus
atggtaagc

SEQ ID NO: 1089 - DNA, 9 bp, Unknown
  May be homo sapiens or mus musculus
atggtacgg

SEQ ID NO: 1090 - DNA, 9 bp, Unknown
  May be homo sapiens or mus musculus
aaggtgaat

SEQ ID NO: 1091 - DNA, 9 bp, Unknown
  May be homo sapiens or mus musculus
gtggtatgt

SEQ ID NO: 1092 - DNA, 9 bp, Unknown
  May be homo sapiens or mus musculus
catgtaagt

SEQ ID NO: 1093 - DNA, 9 bp, Unknown
  May be homo sapiens or mus musculus
taggtatgg

SEQ ID NO: 1094 - DNA, 9 bp, Unknown
  May be homo sapiens or mus musculus
gaggtgaag

SEQ ID NO: 1095 - DNA, 9 bp, Unknown
  May be homo sapiens or mus musculus
ccggtaagt

SEQ ID NO: 1096 - DNA, 9 bp, Unknown
  May be homo sapiens or mus musculus
aaagtatgt

SEQ ID NO: 1097 - DNA, 9 bp, Unknown
  May be homo sapiens or mus musculus
taggttggc

SEQ ID NO: 1098 - DNA, 9 bp, Unknown
  May be homo sapiens or mus musculus
taagtaaga

SEQ ID NO: 1099 - DNA, 9 bp, Unknown
  May be homo sapiens or mus musculus
tgggtactg

SEQ ID NO: 1100 - DNA, 9 bp, Unknown
  May be homo sapiens or mus musculus
aaggtagat

SEQ ID NO: 1101 - DNA, 9 bp, Unknown
  May be homo sapiens or mus musculus
aaggtacag

SEQ ID NO: 1102 - DNA, 9 bp, Unknown
  May be homo sapiens or mus musculus
gaagtaagg

SEQ ID NO: 1103 - DNA, 9 bp, Unknown
  May be homo sapiens or mus musculus
caggtaact

SEQ ID NO: 1104 - DNA, 9 bp, Unknown
  May be homo sapiens or mus musculus
gtagtaagt

SEQ ID NO: 1105 - DNA, 9 bp, Unknown
  May be homo sapiens or mus musculus
aaggtatcc

SEQ ID NO: 1106 - DNA, 9 bp, Unknown
  May be homo sapiens or mus musculus
aaggtgatg

SEQ ID NO: 1107 - DNA, 9 bp, Unknown
  May be homo sapiens or mus musculus
atggtaaga

SEQ ID NO: 1108 - DNA, 9 bp, Unknown
  May be homo sapiens or mus musculus
ttggtaact

SEQ ID NO: 1109 - DNA, 147 bp, Artificial sequence
  Synthetic
ctgtttgagattgagaacgtttttactgtgtcatcagatcctcatccctctcctgcagcccctccttcactttctttacccttatcttcatcttctacctcatctgggactaaaaaacaaaagaggaccccaacttatcagagaatg

SEQ ID NO: 1110 - DNA, 186 bp, Artificial sequence
  Synthetic
gctttcattttcactccatacccaagctggctagccttcctcaggcaccattgccctcagctccatccagcttcctgcctttcagccccactggccctctcctccttggctgctgtgagacaccagtggtctccttggctgaggctcagcaggagctacagattctgcagaagcagttgggagatg

SEQ ID NO: 1111 - DNA, 48 bp, Artificial sequence
  Synthetic
gattataaatcattacattggagtgtgcttctctgtgcggattaaatg

SEQ ID NO: 1112 - DNA, 79 bp, Artificial sequence
  Synthetic
attagctctattcccagaaactgaagtacaaggccattagcgaggagctggaccacgccctcaattacattacctcatg

SEQ ID NO: 1113 - DNA, 171 bp, Artificial sequence
  Synthetic
aatttttaaggggccctgagatagctttgcttcgtaagcgcctgcaacaactgaggcttaagaaggctgagcagcagaggcagcaagagctagctgcacatacccagcaacagccttccacttctgatcagtcttctcattagggctcttcacaggaccctcattcttatg

SEQ ID NO: 1114 - DNA, 123 bp, Artificial sequence
  Synthetic
gtcccctgaagtcattggttgctggctcctgctcagagtgacagcaccctgtggagtctgctggtactgacctaaccaccacagagccccactggagcattgagccagcctagagagggtatg

SEQ ID NO: 1115 - DNA, 33 bp, Artificial sequence
  Synthetic
ttctgaaactgagtccctaaccaagctggaatg

SEQ ID NO: 1116 - DNA, 113 bp, Artificial sequence
  Synthetic
atctattgattctatccctgacaaccaaaagtttaagcagttgcagagggagctctctcaagtgctgacccagcgccagatctacatccagcctgataattaagccgatcatg

SEQ ID NO: 1117 - DNA, 57 bp, Artificial sequence
  Synthetic
gtggaaaaaacccacatcgaggtgacagtacccacctcaaattgtgaccaaacaatg

SEQ ID NO: 1118 - DNA, 101 bp, Artificial sequence
  Synthetic
tttcagaaacaactctccaagttccatttccaaggaaagtcttaaccatttgtcccttctggcgtaccctctttcattgaaatccattcagaatatacatg

SEQ ID NO: 1119 - DNA, 39 bp, Artificial sequence
  Synthetic
gaccagagtaattcggagaagcacgcagattgaattatg

SEQ ID NO: 1120 - DNA, 141 bp, Artificial sequence
  Synthetic
acagctcccgagggctcctttgcctctgctgacgccctcctcagcaggctagctcaccccgtctctctctgtggtgcacttgactatctggagcccgacttagcagaaaagaaccccccactattcgctcagaaactcatg

SEQ ID NO: 1121 - DNA, 27 bp, Artificial sequence
  Synthetic
cctataaattagaagccatctggaatg

SEQ ID NO: 1122 - DNA, 105 bp, Artificial sequence
  Synthetic
agagaggattcaagccattgagaaacagattgccagtttaactggccttgttcagtctgcgctttttaaagggcccattacaagttatagcaaagattcgtcatg

SEQ ID NO: 1123 - DNA, 36 bp, Artificial sequence
  Synthetic
ggcatttttggcagttggagaacaaagcaatccatg

SEQ ID NO: 1124 - DNA, 96 bp, Artificial sequence
  Synthetic
tgaacctatccccgcttcgtgttctgggggcacccaccctgtaattgcgagacttcctagccccactgtagctaggagcgctgtgcagcctgcatg

SEQ ID NO: 1125 - DNA, 30 bp, Artificial sequence
  Synthetic
cctcacaggctgtggaccctggccgagatg

SEQ ID NO: 1126 - DNA, 51 bp, Artificial sequence
  Synthetic
gtcaaaagtccgggtgcggctcctacacggattactgcctgctgttatatg

SEQ ID NO: 1127 - DNA, 66 bp, Artificial sequence
  Synthetic
atcaatacagattctttttcttcctatcctgttttctctcctgtttctttggattatagcagtatg

SEQ ID NO: 1128 - DNA, 29 bp, Artificial sequence
  Synthetic
tgcaacaaggattaatagaattggccatg

SEQ ID NO: 1129 - DNA, 37 bp, Artificial sequence
  Synthetic
ggattaattaaaatcaagttccatcctcagacaaatg

SEQ ID NO: 1130 - DNA, 102 bp, Artificial sequence
  Synthetic
actaatctagacaaagatctcagcctctgccagacagagttagaggcagatttagaaaaaattgagacgcttaataaagcacccagtgcaaacgtgccaatg

SEQ ID NO: 1131 - DNA, 66 bp, Artificial sequence
  Synthetic
cctcccaaaaagatattggattatactcctggagactgctctatccttcctagagaggatagaatg

SEQ ID NO: 1132 - DNA, 75 bp, Artificial sequence
  Synthetic
acactcctgaagaaaacccttatttccctacgtacaaattccctgaacttcctgaaatccagcaaacttccgatg

SEQ ID NO: 1133 - DNA, 96 bp, Artificial sequence
  Synthetic
caactgccgaccctttacgcgcacgctctatttctgctgttaaaatcattcctgtgaagacagtgaaaaacgcctcaggcctagttctccctaatg

SEQ ID NO: 1134 - DNA, 96 bp, Artificial sequence
  Synthetic
gtgattctgagccctgccattcaaggggtcatcctggccatagctaaagcccgtcagacctttgaccgagattggtctgaagcagggctgattatg

SEQ ID NO: 1135 - DNA, 33 bp, Artificial sequence
  Synthetic
acacaacggcgacgacagaaccagcagttcatg

SEQ ID NO: 1136 - DNA, 126 bp, Artificial sequence
  Synthetic
aataaactactctctaaaggcctgtctcatactcatcctccatctcctccctctcgccttccgtctcctgatccagctgcttcttcctctccatcaactgttgactctgcttctcctgccagaatg

SEQ ID NO: 1137 - DNA, 42 bp, Artificial sequence
  Synthetic
atagtttcaaacaaaagcatacctcgaaagcgccccagaatg

SEQ ID NO: 1138 - DNA, 71 bp, Artificial sequence
  Synthetic
gcaatttatcaggaacacagaggttggattctgctacagtcaggacttactcctgctaaagtctcctgatg

SEQ ID NO: 1139 - DNA, 27 bp, Artificial sequence
  Synthetic
agtttcagttcctgcattcagcttatg

SEQ ID NO: 1140 - DNA, 33 bp, Artificial sequence
  Synthetic
atcgtggccggagtgtcagtgcccccgtatatg

SEQ ID NO: 1141 - DNA, 43 bp, Artificial sequence
  Synthetic
tcattgcacaataaggatttttgaatttataatatcatctatg

SEQ ID NO: 1142 - DNA, 105 bp, Artificial sequence
  Synthetic
acgcagaccaaactggagcattcccgcattaaggagcttgaacagagcctgctctttgaaaagaccaaagctgacaaactccagagggagttagaagacactatg

SEQ ID NO: 1143 - DNA, 48 bp, Artificial sequence
  Synthetic
aaagcaagacagatctcattggctgtcacaagtgcagttcctgtaatg

SEQ ID NO: 1144 - DNA, 39 bp, Artificial sequence
  Synthetic
gtctgattaaagtgactcctctctctcggaggtacaatg

SEQ ID NO: 1145 - DNA, 129 bp, Artificial sequence
  Synthetic
ctcagattctggaacttcagaggctagtctttcacctccttcttccccaccaagccggccccgtaattaactgaatttttttaatcgtcttactgtttctcagggaaacacatcagttcagcaggaatg

SEQ ID NO: 1146 - DNA, 132 bp, Artificial sequence
  Synthetic
gcacggccagggtggagctctgtgcacagggctcagcggacctggcacacctggacgacggtccctacgaggcggggggagagaaggagcaggacccccgcctcatcccggtccctgccaacagctactatg

SEQ ID NO: 1147 - DNA, 62 bp, Artificial sequence
  Synthetic
actattaactgctgggagataagaccatctgatttatccgtgtacatacagcagctagcatg

SEQ ID NO: 1148 - DNA, 87 bp, Artificial sequence
  Synthetic
attgatttagtgaattctttccagagtggaagttccattcagggggctctaaggcggcaaccctccatcgccagccagcatcatatg

SEQ ID NO: 1149 - DNA, 165 bp, Artificial sequence
  Synthetic
caatctttcgtcagttcgacgcatttacaaggagagtaattcttcctccagtcttccaagtcttcacacttccttctctgccccttccttcactgccccctctttcctgaaaagcttttaccagaattcaggtagactgtccccacagtattaaaattaaatatg

SEQ ID NO: 1150 - DNA, 57 bp, Artificial sequence
  Synthetic
catctgaatccatttctttgaaaaacttaaaaaggcgatcacaattttttgaacatg

SEQ ID NO: 1151 - DNA, 42 bp, Artificial sequence
  Synthetic
ggtcatcaggcttttcttacagttcattggtctacctctatg

SEQ ID NO: 1152 - DNA, 141 bp, Artificial sequence
  Synthetic
gttcccagtgcccccgacaagcccctgctggtgtctccatctcctgccaagcatcctccagtgcctcctcctgtgggcctggcctcagggctattgacagactcctgtcccatcccagagacccctcgtgatcgtgccatg

SEQ ID NO: 1153 - DNA, 141 bp, Artificial sequence
  Synthetic
ccattagaagccgatccattggtgaatttgctctgccatcggcctatatacgcagtgctaaaagtgctcctgttctgatccatacttccaaacccttcttgcctgatattgttctcactcccctttctgattagctttatg

SEQ ID NO: 1154 - DNA, 51 bp, Artificial sequence
  Synthetic
gcaactctccagaagcatactttcattgttttccttcccttttttcagatg

SEQ ID NO: 1155 - DNA, 151 bp, Artificial sequence
  Synthetic
cctgaccaagaaggcgtcaccataccagatctggggagtctctcctcacctctgatagacacagagaggaatctgggcctgcttctcggattacacgcttcctatttagcaattagcacaccgctgtctcctgtcgagattgaatttgatg

SEQ ID NO: 1156 - DNA, 87 bp, Artificial sequence
  Synthetic
cattacctggccaggaatttctacaacctgaggttccttgctctgtttgtagccttcgctatcaacttcatcctgcttttttatatg

SEQ ID NO: 1157 - DNA, 168 bp, Artificial sequence
  Synthetic
acattgaggtatcttcatcttctgttaccacaattgcaagtatcccagaaatcacacctaaagtgattgatacctggagacctaaactgacaagctctcggaaatttgtagttcaagattatccaaacacttctgattttactgatcctttatcgggtatcccaaatg

SEQ ID NO: 1158 - DNA, 39 bp, Artificial sequence
  Synthetic
cgagccatttcctccaaccgattagcaattggttgcatg

SEQ ID NO: 1159 - DNA, 107 bp, Artificial sequence
  Synthetic
aacgtattttcagcagcattttgaagcacccctggcgtgcactgcacagggaaaccaggaccacattggtgtgctgtgtcctccttaccaactggctcttggagatg

SEQ ID NO: 1160 - DNA, 98 bp, Artificial sequence
  Synthetic
ggctggagactctgaaagacacaccgcccccacggctcatcaagtcacacctgcccctggctctgctccctcagactctgttggatcagaaggtcatg

SEQ ID NO: 1161 - DNA, 39 bp, Artificial sequence
  Synthetic
ttgcgtacttgaaggaccgaaggctgagtggaggagatg

SEQ ID NO: 1162 - DNA, 87 bp, Artificial sequence; identical to SEQ ID NO: 942
  Synthetic

SEQ ID NO: 1163 - DNA, 38 bp, Artificial sequence
  Synthetic
tacgattccaactgttaagcctgcaggaatcctccatg

SEQ ID NO: 1164 - DNA, 69 bp, Artificial sequence
  Synthetic
gtcacgagcattatttccgagttaagcacctgtccgaggccttgaacgacaagcacgggccgctggatg

SEQ ID NO: 1165 - DNA, 153 bp, Artificial sequence
  Synthetic
ggcttcttccctgtaccccaaggggcggcctgcctggcccctggataaacgctgcttgtgtttgtgcggccgacatctcgccaggtcacgagcattatttccgagttaagcacctgtccgaggccttgaacgacaagcacgggccgctggatg

SEQ ID NO: 1166 - DNA, 49 bp, Artificial sequence
  Synthetic
gtcagcttgcaaggttgaattcaatatccttttatcacactcctctatg

SEQ ID NO: 1167 - DNA, 123 bp, Artificial sequence
  Synthetic
actaagcagtcttctggggaaaagctcattgattgctctgaaatcttcagtttattagagtctgcgcgaaaaccaacagaattcataggaggggttacttctacttctcaaagctgggttatg

SEQ ID NO: 1168 - DNA, 120 bp, Artificial sequence
  Synthetic
cttgcagaagattgtgcgtccggatcagccacaaacagtaacaaccatctaatcgagcctcagatccgccggcctcgtagcctcagctcgccaacagtaactttatctgccccgctgatg

SEQ ID NO: 1169 - DNA, 80 bp, Artificial sequence
  Synthetic
ggttaccctcgatccctctaaacggcagaactctaaccgctgtgtttcgggcgcctctctgccccagggatccaagaatg

SEQ ID NO: 1170 - DNA, 27 bp, Artificial sequence
  Synthetic
gagaccaaggagatcagctgggagatg

SEQ ID NO: 1171 - DNA, 108 bp, Artificial sequence
  Synthetic
cacggagcagccgtatccctcgacccagcattagtcaggggtgcagccgcgataccagccgtgagagcagccgagatacaagccctgctcggggctttcctccacatg

SEQ ID NO: 1172 - DNA, 45 bp, Artificial sequence
  Synthetic
aaagaaaagtaaactgttttcgcggctgcgcagaaagaagaaatg

SEQ ID NO: 1173 - DNA, 60 bp, Artificial sequence
  Synthetic
gacgctgcattgggatacagatccatcagttcttcagcttcactcagattccgatttatg

SEQ ID NO: 1174 - DNA, 129 bp, Artificial sequence
  Synthetic
attttcacatttcacacgaaactcgtattcaagaccttcaataaggtttttcactgaaaagacagtttctcgaatttcttctgttgtcacagaaatccatttattctgcttcttctcacgcttctcatg

SEQ ID NO: 1175 - DNA, 72 bp, Artificial sequence
  Synthetic
gaactcaattagttaaaggaccagattcaggatttagaaggcaaatacattcagggattgaaagagattatg

SEQ ID NO: 1176 - DNA, 27 bp, Artificial sequence
  Synthetic
ccaacactgtgcctggaggacccaatg

SEQ ID NO: 1177 - DNA, 135 bp, Artificial sequence
  Synthetic
cttcctggtggccgacttcaggcggcggggcgtggacgtgtctcaggtggcctggcagagcaagggggacacccccagctcctgctgcatcatcaacaactccaattgcaaccgtaccattgtgctccattaatg

SEQ ID NO: 1178 - DNA, 107 bp, Artificial sequence
  Synthetic
caaaacaatatcagtcaaggtaattgattattaggagtattagaaaaacaagaccttcttccttgagattggagagccccgcctggtggagattagtgagaagaatg

SEQ ID NO: 1179 - DNA, 54 bp, Artificial sequence
  Synthetic
ctaggactcagattggatcaaaattcacacggtggggatcacagggagaaaatg

SEQ ID NO: 1180 - DNA, 93 bp, Artificial sequence
  Synthetic
aagcatcctcatcttctataagggagcgaccacctgaagaagttgcagctcgccttgcacaacaggaaaaacaagaacaagttaaaattgatg

SEQ ID NO: 1181 - DNA, 57 bp, Artificial sequence
  Synthetic
gaagttatcaaggaggattctgctgaggggctttcttcacccacagactcctcgatg

SEQ ID NO: 1182 - DNA, 78 bp, Artificial sequence
  Synthetic
cacagtttgctgcttttctgaaacaaaatattctggtgaggaaagctcttcctcctggcacctcctcctgtctctatg

SEQ ID NO: 1183 - DNA, 189 bp, Artificial sequence
  Synthetic
caaagatcacctgtctattctggatttgtgtttccttccgctctttctcctcatcctatcactcaacatacatcagccccattgcctgaattcattgctacatctgtcgatcctttacctttaaattacacacctcctcctttaccagctaagaaacacagaaggcagcagcagcagcaggagcaaatg

SEQ ID NO: 1184 - DNA, 36 bp, Artificial sequence
  Synthetic
gagcaattagtaattccaaaagttcaagtatcaatg

SEQ ID NO: 1185 - DNA, 150 bp, Artificial sequence
  Synthetic
agctccccacgattagattgtgctgtgctggctctgcagtttctctctcttcagtcccattttccggaagtgtgatattcgtctttatctggtttttccattcctttttctcaaatagtatctactctctccttttctcttccttctatg

SEQ ID NO: 1186 - DNA, 81 bp, Artificial sequence
  Synthetic
attatagtgaaaaaaaaccccagcgacgcaatcgtagccgcaggcgtcgcttcaggggtcaggcagaagatagacagcatg

SEQ ID NO: 1187 - DNA, 102 bp, Artificial sequence
  Synthetic
gccctagagaaacagaaagaatacattgcctgccttaggaattagcgagatattctcagagaggagctggctgacctgcaggagacagtgaagacgggaatg

SEQ ID NO: 1188 - DNA, 93 bp, Artificial sequence
  Synthetic
gagaagcagcgcattcagcagaaaatagacaccattacaaaagaggtgtttgacctccaggagacacttctttggaaagataaaaaaattatg

SEQ ID NO: 1189 - DNA, 51 bp, Artificial sequence
  Synthetic
tactctcttcattcctttgatcggaagtggggacagattcagaagtggatg

SEQ ID NO: 1190 - DNA, 117 bp, Artificial sequence
  Synthetic
ttttgaatatactaacactgaatcagcacttctaaagcccttccttctcccactggcttcacttggctttcagacataattaggagactggcttttcgaggcgctggttgtgctatg

SEQ ID NO: 1191 - DNA, 69 bp, Artificial sequence
  Synthetic
ggaaaaagagagaaatttattagcatcctgtcttctgcttggcctcccaagtgattgatttaaccaatg

SEQ ID NO: 1192 - DNA, 30 bp, Artificial sequence
  Synthetic
ctactgttgaggctattgaggctgattatg

SEQ ID NO: 1193 - DNA, 99 bp, Artificial sequence
  Synthetic
taaacttcacctgccaacggctcctcccccacttaattagggagaaagtttggtcagccgcattcttcagctggggcctcctggaaccaaattcctatg

SEQ ID NO: 1194 - DNA, 92 bp, Artificial sequence
  Synthetic
gctttgagttacacaggtagccacattaaagtccacttacccagtttagtagagaattaaatcctgaaagaggattgatcaataattaaatg

SEQ ID NO: 1195 - DNA, 42 bp, Artificial sequence
  Synthetic
gagccccaaactactgtaatccacaaccctgattgaaacatg

SEQ ID NO: 1196 - DNA, 151 bp, Artificial sequence
  Synthetic
tcctggatcagtgagagtgtggaggccgacgtgcgcctccgcctggccaatttgtcggagcgggacgggggcgagtacctctgtcgagccaccaatttcataggcgtggccgagaaggccttttggctgagcgttcacgggccccgagatg

SEQ ID NO: 1197 - DNA, 188 bp, Artificial sequence
  Synthetic
gaattcaaacccattggtaccgcgcacaacagaagggcccagccttttgttgcagctgcaaacattgattacaaaagacaggtagtgagcgcttcctataactcgccaattgggctctattcaactagcaatatacaagattcgcttcacggacagctgcggggtctcattcctagctcacctcaatg

SEQ ID NO: 1198 - DNA, 45 bp, Artificial sequence
  Synthetic
ccatttccctgaacctgaggattattgctgctctcctgattaatg

SEQ ID NO: 1199 - DNA, 54 bp, Artificial sequence; identical to SEQ ID NO: 979
  Synthetic

SEQ ID NO: 1200 - DNA, 39 bp, Artificial sequence
  Synthetic
aaaaccagtctatccaagaccaggcacctattttggatg

SEQ ID NO: 1201 - DNA, 60 bp, Artificial sequence
  Synthetic
aacacctacacctctataggtgctggtccgtttcctctgtggaatttctaggctccaatg

SEQ ID NO: 1202 - DNA, 45 bp, Artificial sequence
  Synthetic
aaaggaaaatatcccaaggactaatctgatcgggtcttccttatg

SEQ ID NO: 1203 - DNA, 132 bp, Artificial sequence
  Synthetic
gggagaatttcgatcgccaggccagccttcggcggtctctaatttacacagacactctggtaagacgaccgaagaaagtcaaaaggagaaagactattacaggagtccctgacaacatacagaaggagcatg

SEQ ID NO: 1204 - DNA, 100 bp, Artificial sequence
  Synthetic
cggtgttgggcctgcttgccgcgggagtgacgctacttcttccagagaccaagggggtcgctttgccagagaccattaaggacgccgagaaccttggatg

SEQ ID NO: 1205 - DNA, 151 bp, Artificial sequence
  Synthetic
gagggtcccccccagctgaccagaccctggtcatcaagacattccgcttcctgtcacagaaactctttatctccgtctcagttctctccagcctgggcattgtcctagctgttgtctgtctgtcctttaacatctacaactcacatttatg

SEQ ID NO: 1206 - DNA, 60 bp, Artificial sequence
  Synthetic
cattcttctgattctccttcaaggtccccaaagacattgttgggttctgacacagtcatg

SEQ ID NO: 1207 - DNA, 72 bp, Artificial sequence
  Synthetic
ttcatcatcattggagtaaaattttacgttcggaatcaaactcttcaattactactactcagcctactaatg

SEQ ID NO: 1208 - DNA, 27 bp, Artificial sequence
  Synthetic
cttggattcctatccggtaacttcatg

SEQ ID NO: 1209 - DNA, 99 bp, Artificial sequence
  Synthetic
gcgtgtgaccccctgccgcacgaggaggagccctctgaagtgccacagctgcgccagccctacgctcctccccggcccggcgcccgccccacacacatg

SEQ ID NO: 1210 - DNA, 75 bp, Artificial sequence
  Synthetic
tgggcagacagaccaccgctccggccacaatttccaccgcggcctccggcaccaccattgggctggtggaacatg

SEQ ID NO: 1211 - DNA, 45 bp, Artificial sequence
  Synthetic
ttcgtctgagcaaaactcagtccgagccttccctgagctgtcatg

SEQ ID NO: 1212 - DNA, 112 bp, Artificial sequence
  Synthetic
cttagatttgttgacagcggtttcctggagtgctgtcttgagaacgattctgaggaggctcagcaagaaagagtgtttcagttgattgggtgtgtctgtcattgagaagatg

SEQ ID NO: 1213 - DNA, 57 bp, Artificial sequence
  Synthetic
cctattggtgtaggtataccaacaattaatttaagaaaaaggagacccaatatcatg

SEQ ID NO: 1214 - DNA, 108 bp, Artificial sequence
  Synthetic
ggtcttgctttgtctcccaggctggtgtgcagtggtgcgaccacggctcacggcagcctcagccacccagatttaagcgatctggttcccacctcagcctcccgaatg

SEQ ID NO: 1215 - DNA, 27 bp, Artificial sequence
  Synthetic
atcactacattccaagctatcagaatg

SEQ ID NO: 1216 - DNA, 33 bp, Artificial sequence
  Synthetic
tgtccattttacttcactgaagaaacatacatg

SEQ ID NO: 1217 - DNA, 67 bp, Artificial sequence; identical to SEQ ID NO: 997
  Synthetic

SEQ ID NO: 1218 - DNA, 95 bp, Artificial sequence
  Synthetic
agccagaattaagaattgggaggtttgtctgaggatatcttattataaagagcagtctaaggctttagtccctttgatccccaacttatttaatg

SEQ ID NO: 1219 - DNA, 9 bp, Artificial sequence
  Synthetic
atggtacga

SEQ ID NO: 1220 - DNA, 9 bp, Artificial sequence
  Synthetic
atggtaggg

SEQ ID NO: 1221 - DNA, 9 bp, Artificial sequence
  Synthetic
atggtgggt

SEQ ID NO: 1222 - DNA, 9 bp, Artificial sequence
  Synthetic
atggtatac

SEQ ID NO: 1223 - DNA, 9 bp, Artificial sequence
  Synthetic
atggtacag

SEQ ID NO: 1224 - DNA, 9 bp, Artificial sequence
  Synthetic
atggtacgt

SEQ ID NO: 1225 - DNA, 9 bp, Artificial sequence
  Synthetic
atggttcgt

SEQ ID NO: 1226 - DNA, 9 bp, Artificial sequence
  Synthetic
atggtaggt

SEQ ID NO: 1227 - DNA, 9 bp, Artificial sequence
  Synthetic
atggtaggc

SEQ ID NO: 1228 - DNA, 9 bp, Artificial sequence
  Synthetic
atggttagt

SEQ ID NO: 1229 - DNA, 9 bp, Artificial sequence
  Synthetic
atggtaggt

SEQ ID NO: 1230 - DNA, 9 bp, Artificial sequence
  Synthetic
atggtaggc

SEQ ID NO: 1231 - DNA, 9 bp, Artificial sequence
  Synthetic
atggtacgc

SEQ ID NO: 1232 - DNA, 9 bp, Artificial sequence
  Synthetic
atggtaacg

SEQ ID NO: 1233 - DNA, 9 bp, Artificial sequence
  Synthetic
atggtacgg

SEQ ID NO: 1234 - DNA, 9 bp, Artificial sequence
  Synthetic
atggtaagc

SEQ ID NO: 1235 - DNA, 9 bp, Artificial sequence
  Synthetic
atggtaaga

SEQ ID NO: 1236 - DNA, 9 bp, Artificial sequence
  Synthetic
atggtatgt

SEQ ID NO: 1237 - DNA, 9 bp, Artificial sequence
  Synthetic
atggtacga

SEQ ID NO: 1238 - DNA, 9 bp, Artificial sequence
  Synthetic
atggtaagc

SEQ ID NO: 1239 - DNA, 9 bp, Artificial sequence
  Synthetic
atggtgagc

SEQ ID NO: 1240 - DNA, 9 bp, Artificial sequence
  Synthetic
atggtaggc

SEQ ID NO: 1241 - DNA, 9 bp, Artificial sequence
  Synthetic
atggtaggt

SEQ ID NO: 1242 - DNA, 9 bp, Artificial sequence
  Synthetic
atggtacga

SEQ ID NO: 1243 - DNA, 9 bp, Artificial sequence
  Synthetic
atggtaggc

SEQ ID NO: 1244 - DNA, 9 bp, Artificial sequence
  Synthetic
atggtgagg

SEQ ID NO: 1245 - DNA, 9 bp, Artificial sequence
  Synthetic
atggtaaat

SEQ ID NO: 1246 - DNA, 9 bp, Artificial sequence
  Synthetic
atggtaaat

SEQ ID NO: 1247 - DNA, 9 bp, Artificial sequence
  Synthetic
atggtaggg

SEQ ID NO: 1248 - DNA, 9 bp, Artificial sequence
  Synthetic
atggtaagc

SEQ ID NO: 1249 - DNA, 9 bp, Artificial sequence
  Synthetic
atggtagga

SEQ ID NO: 1250 - DNA, 9 bp, Artificial sequence
  Synthetic
atggtaggg

SEQ ID NO: 1251 - DNA, 9 bp, Artificial sequence
  Synthetic
atggtgagt

SEQ ID NO: 1252 - DNA, 9 bp, Artificial sequence
  Synthetic
atggtaacg

SEQ ID NO: 1253 - DNA, 9 bp, Artificial sequence
  Synthetic
atggtaaga

SEQ ID NO: 1254 - DNA, 9 bp, Artificial sequence
  Synthetic
atggtacgg

SEQ ID NO: 1255 - DNA, 9 bp, Artificial sequence
  Synthetic
atggtacgg

SEQ ID NO: 1256 - DNA, 9 bp, Artificial sequence
  Synthetic
atggtacat

SEQ ID NO: 1257 - DNA, 9 bp, Artificial sequence
  Synthetic
atggtatgt

SEQ ID NO: 1258 - DNA, 9 bp, Artificial sequence
  Synthetic
atggtattg

SEQ ID NO: 1259 - DNA, 9 bp, Artificial sequence
  Synthetic
atggtaagc

SEQ ID NO: 1260 - DNA, 9 bp, Artificial sequence
  Synthetic
atggtacgg

SEQ ID NO: 1261 - DNA, 9 bp, Artificial sequence
  Synthetic
atggtacat

SEQ ID NO: 1262 - DNA, 9 bp, Artificial sequence
  Synthetic
atggtgggt

SEQ ID NO: 1263 - DNA, 9 bp, Artificial sequence
  Synthetic
atggttcgt

SEQ ID NO: 1264 - DNA, 9 bp, Artificial sequence
  Synthetic
atggtacga

SEQ ID NO: 1265 - DNA, 9 bp, Artificial sequence
  Synthetic
atggtaggg

SEQ ID NO: 1266 - DNA, 9 bp, Artificial sequence
  Synthetic
atggtactg

SEQ ID NO: 1267 - DNA, 9 bp, Artificial sequence
  Synthetic
atggtaagc

SEQ ID NO: 1268 - DNA, 9 bp, Artificial sequence
  Synthetic
atggtaagc

SEQ ID NO: 1269 - DNA, 9 bp, Artificial sequence
  Synthetic
atggtaggt

SEQ ID NO: 1270 - DNA, 9 bp, Artificial sequence
  Synthetic
atggtaagc

SEQ ID NO: 1271 - DNA, 9 bp, Artificial sequence
  Synthetic
atggtatgc

SEQ ID NO: 1272 - DNA, 9 bp, Artificial sequence
  Synthetic
atggtgagg

SEQ ID NO: 1273 - DNA, 9 bp, Artificial sequence
  Synthetic
atggttagg

SEQ ID NO: 1274 - DNA, 9 bp, Artificial sequence
  Synthetic
atggtaagt

SEQ ID NO: 1275 - DNA, 9 bp, Artificial sequence
  Synthetic
atggtaagt

SEQ ID NO: 1276 - DNA, 9 bp, Artificial sequence
  Synthetic
atggtgagt

SEQ ID NO: 1277 - DNA, 9 bp, Artificial sequence
  Synthetic
atggtacag

SEQ ID NO: 1278 - DNA, 9 bp, Artificial sequence
  Synthetic
atggtgagg

SEQ ID NO: 1279 - DNA, 9 bp, Artificial sequence
  Synthetic
atggtaagc

SEQ ID NO: 1280 - DNA, 9 bp, Artificial sequence
  Synthetic
atggtaaga

SEQ ID NO: 1281 - DNA, 9 bp, Artificial sequence
  Synthetic
atggtaagc

SEQ ID NO: 1282 - DNA, 9 bp, Artificial sequence
  Synthetic
atggtgagt

SEQ ID NO: 1283 - DNA, 9 bp, Artificial sequence
  Synthetic
atggttcgc

SEQ ID NO: 1284 - DNA, 9 bp, Artificial sequence
  Synthetic
atggtgcgg

SEQ ID NO: 1285 - DNA, 9 bp, Artificial sequence
  Synthetic
atggtacga

SEQ ID NO: 1286 - DNA, 9 bp, Artificial sequence
  Synthetic
atggttcgg

SEQ ID NO: 1287 - DNA, 9 bp, Artificial sequence
  Synthetic
atggtaggc

SEQ ID NO: 1288 - DNA, 9 bp, Artificial sequence
  Synthetic
atggtaggg

SEQ ID NO: 1289 - DNA, 9 bp, Artificial sequence
  Synthetic
atggtaccc

SEQ ID NO: 1290 - DNA, 9 bp, Artificial sequence
  Synthetic
atggtaaaa

SEQ ID NO: 1291 - DNA, 9 bp, Artificial sequence
  Synthetic
atggtaacg

SEQ ID NO: 1292 - DNA, 9 bp, Artificial sequence
  Synthetic
atggtaagc

SEQ ID NO: 1293 - DNA, 9 bp, Artificial sequence
  Synthetic
atggtacgc

SEQ ID NO: 1294 - DNA, 9 bp, Artificial sequence
  Synthetic
atggtaggt

SEQ ID NO: 1295 - DNA, 9 bp, Artificial sequence
  Synthetic
atggtaagg

SEQ ID NO: 1296 - DNA, 9 bp, Artificial sequence
  Synthetic
atggtaggt

SEQ ID NO: 1297 - DNA, 9 bp, Artificial sequence
  Synthetic
atggtacgt

SEQ ID NO: 1298 - DNA, 9 bp, Artificial sequence
  Synthetic
atggtaaag

SEQ ID NO: 1299 - DNA, 9 bp, Artificial sequence
  Synthetic
atggttagt

SEQ ID NO: 1300 - DNA, 9 bp, Artificial sequence
  Synthetic
atggtgcgg

SEQ ID NO: 1301 - DNA, 9 bp, Artificial sequence
  Synthetic
atggtacga

SEQ ID NO: 1302 - DNA, 9 bp, Artificial sequence
  Synthetic
atggtaggt

SEQ ID NO: 1303 - DNA, 9 bp, Artificial sequence
  Synthetic
atggtactt

SEQ ID NO: 1304 - DNA, 9 bp, Artificial sequence
  Synthetic
atggttggt

SEQ ID NO: 1305 - DNA, 9 bp, Artificial sequence
  Synthetic
atggtgcgc

SEQ ID NO: 1306 - DNA, 9 bp, Artificial sequence
  Synthetic
atggtgagt

SEQ ID NO: 1307 - DNA, 9 bp, Artificial sequence
  Synthetic
atggtacgt

SEQ ID NO: 1308 - DNA, 9 bp, Artificial sequence
  Synthetic
atggtaagc

SEQ ID NO: 1309 - DNA, 9 bp, Artificial sequence
  Synthetic
atggtacgg

SEQ ID NO: 1310 - DNA, 9 bp, Artificial sequence
  Synthetic
atggtaaat

SEQ ID NO: 1311 - DNA, 9 bp, Artificial sequence
  Synthetic
atggtgagg

SEQ ID NO: 1312 - DNA, 9 bp, Artificial sequence
  Synthetic
atggtatgt

SEQ ID NO: 1313 - DNA, 9 bp, Artificial sequence
  Synthetic
atggtaggc

SEQ ID NO: 1314 - DNA, 9 bp, Artificial sequence
  Synthetic
atggtaccc

SEQ ID NO: 1315 - DNA, 9 bp, Artificial sequence
  Synthetic
atggtaagt

SEQ ID NO: 1316 - DNA, 9 bp, Artificial sequence
  Synthetic
atggtgcgc

SEQ ID NO: 1317 - DNA, 9 bp, Artificial sequence
  Synthetic
atggtattc

SEQ ID NO: 1318 - DNA, 9 bp, Artificial sequence
  Synthetic
atggtactt

SEQ ID NO: 1319 - DNA, 9 bp, Artificial sequence
  Synthetic
atggtacca

SEQ ID NO: 1320 - DNA, 9 bp, Artificial sequence
  Synthetic
atggtgaga

SEQ ID NO: 1321 - DNA, 9 bp, Artificial sequence
  Synthetic
atggtacgg

SEQ ID NO: 1322 - DNA, 9 bp, Artificial sequence
  Synthetic
atggtaaat

SEQ ID NO: 1323 - DNA, 9 bp, Artificial sequence
  Synthetic
atggtaggt

SEQ ID NO: 1324 - DNA, 9 bp, Artificial sequence
  Synthetic
atggtacga

SEQ ID NO: 1325 - DNA, 9 bp, Artificial sequence
  Synthetic
atggtatgt

SEQ ID NO: 1326 - DNA, 9 bp, Artificial sequence
  Synthetic
atggtactt

SEQ ID NO: 1327 - DNA, 9 bp, Artificial sequence
  Synthetic
atggtaaga

SEQ ID NO: 1328 - DNA, 9 bp, Artificial sequence
  Synthetic
atggtaccc

SEQ ID NO: 1329 - DNA, 168 bp, Unknown
  May be homo sapiens or mus musculus
gtaagtcaggaaagcagtcatctcagcttaccttgctttgtgttaagagcatgacctaggattgccactcattctggttgaaatatcttgccgactcaccttctaacttcccgaatcatttttttcaccttcactcttgaaagataacttcagtagattagggtctta

SEQ ID NO: 1330 - DNA, 181 bp, Unknown
  May be homo sapiens or mus musculus
gtgagcacttctgcatttgtgtgcttgcgattggcagccccacactgtgttgctctgcatggctcgggctggatggcagagtttaaaaaaacaacacgggtacacgttacaaatgtaagagggagggaaagctctgtttgcttattttttggaaatgtatttactgttatttctgtggtgt

SEQ ID NO: 1331 - DNA, 251 bp, Unknown
  May be homo sapiens or mus musculus
gtgggtgaaacatccctgtggaggatcccagttattgagtcttagtcacagatgataatgtgatgctgatttgcatttaccttgctggaggcaaggcaggcgtgggcaggctgtcacagtcatggaacatgtgtgggagctgtgagagtcagaaggaaaatacattatcctcatgaacaggcccagtttctattcctggtctgggagaataatcattttgaggttgttggcttgtggttgatctcctggtg

SEQ ID NO: 1332 - DNA, 194 bp, Unknown
  May be homo sapiens or mus musculus
gtaactatctgacagtagagtggggctgggatcttggcttgtgggtggatgggggtacaagctatgcatagtggtgtgctttggttttatcctttggaaactagaatctccacccttatctttgaaacattggtgctggttatttgtttggcaaaagctttggaggcatggccgggcgcggtggctcacgcctg

SEQ ID NO: 1333 - DNA, 140 bp, Unknown
  May be homo sapiens or mus musculus
gttattaatgtcaagtgtccttaagcagctgatagaattgttttttaatactgctactgtgtaataaggtgcttcccttttcccattcaaaaagagagctaatgcgcttgcagcttacccctcctttccttgcatatggg

SEQ ID NO: 1334 - DNA, 179 bp, Unknown
  May be homo sapiens or mus musculus
gtaggaactgttttttcactttatggcacggttttaccaattggaaaaaagtaatttttataccccaaaagggtgtaaaacattggtgattatttttgaaaaagggcttttcaaaactgagccatattggaaaaaatcagcacttacccgatcctgtgcaagcaggctctaaacaacac

SEQ ID NO: 1335 - DNA, 209 bp, Unknown
  May be homo sapiens or mus musculus
gttagtatgccctctttcttttctctgcacgagtgagtgtgtgtcagagagccgtgtaaccaatggtgtggctttgcattgattctgcttctgttgaagagtcttcctgcttctttctgttctggtcattgcatggctacagagctgtccatgtgtaaaaatggagtatatggaagatcgtaagtgcactcttggtgttggccatgtcg

SEQ ID NO: 1336 - DNA, 217 bp, Unknown
  May be homo sapiens or mus musculus
gtaccctgcctgagagccgcgagaccctccccactaaaacaggactcaccaacccgccgagaccctgccggtccggctgctgctccgcggccatttaaaccaccactaacccccacgtgtgctcccggtcggtgcacagccacattcccgtgtagcctcggccccatgtaacacggcacctatcacgtgtgtgtgctttccactctgggtggaggct

SEQ ID NO: 1337 - DNA, 246 bp, Unknown
  May be homo sapiens or mus musculus
gtttgtgccaataggccacttgttcctctttccctccaccccctcagtttttttcttctcccttactcccttttccttaaaaaaattataaaatgaaggttcaaacaaacttcaatgagcaacattttatcatttttctttcttttttaaattatggcaaaacagaagcttgcagaaaaaactgaagatctgataagaatgaggaaggttagccatttttcactttcacaaaactacattgccatt

SEQ ID NO: 1338 - DNA, 224 bp, Unknown
  May be homo sapiens or mus musculus
gtactctgtctttgtgtgtgtgtgaagccataaaatctaatgttacgtgtgcggtggtgctgtgaggtatgcttctcgtgcaagcggctccctcagccctgctgtggtaaagaccaagtataaattgtcgctaacagggttttctcattagagtcgtgtgcctgagtgtcccctgtgaattataatgcctccagccctcttgctgctcctctgctctgcctgtc

SEQ ID NO: 1339 - DNA, 255 bp, Unknown
  May be homo sapiens or mus musculus
gtaagtttaatgtaatctttttgtttccctttacttctgcagagcattataaccagtcatatcaggagaagcctgaattactactcatttttcaatgccaactactcactgctttttgttgttgactcttgcagtttcctttaagctcccttctttcagcaatcatttgcaggggaaatgacaatcttaaaatttttctaagtgtgggttcagattgaatcactttgcatgtattaacttgaagggttaatcatg

SEQ ID NO: 1340 - DNA, 198 bp, Unknown
  May be homo sapiens or mus musculus
gtttgtagcccacgtgtgaccttttgggagtttgtcaaaacctcagtagagaatgaacccccgaggcccaaatgaaataaggcaggatttgatgaggaactgccgagaacgttcccagtgacatatcttcccctcaaaggatggtatatgtgacgttctttccccacgataccaaagtgatgtaaattgtgtgattac

SEQ ID NO: 1341 - DNA, 385 bp, Unknown
  May be homo sapiens or mus musculus
gtatgagtttttgtttttgcatttttaaaaaaatcttgaattcaggaaaatacatgcatgacttttggcttggaatggtttggctttttgtggacggcatgaagtggcttgagatcaaagcttgaatttttttttttttttaataaagtcctgaatctgagactgcgttattttcagctccaccaccactcctctcccccacctctcccaataaaacagtctatttggaaagacttcaaaacatttattcatccagccacagtaatattagtggtggtaattttcctgccttctccggaatattttaagccatcgattttatgtttgcattgttaatacgtccttttgggtcctaagaacctctgcctaaagtataaagccgtat

SEQ ID NO: 1342 - DNA, 222 bp, Unknown
  May be homo sapiens or mus musculus
gtaaaaaagaagaaagccaatgaaaaaaataattcaatctgtttctcttttaatcattaagataattcattcattcaaatctgttttcttgtaatcatttcaaggctgaaaatattcacatctctatggatcatgggcgttatttttttgttttggggggtttggttgctttttttctttcctccttctggtaattcttggtcgaaagtaacactttggccc

SEQ ID NO: 1343 - DNA, 130 bp, Unknown
  May be homo sapiens or mus musculus
gtaaacagctgtaggctttggattggtgtgtaagaaatatgcgtggcccgcatgtcttagaaatgtaattaaaggaacgatttagttatagtccacttttttggggggatgtggttttgtggagtaacat

SEQ ID NO: 1344 - DNA, 227 bp, Unknown
  May be homo sapiens or mus musculus
gtactggacagatacagatgcatgcggcacccggtgcaaaggtgccgaacagcagatgcatcctaaagtcttgaatgtctgtcgtttgtttgacaaacaagtcaatgccgtgagttgttccagaatgcgtggcattttgttttgtcatagcacaaggtgctgataaccacatgctggcgtgcgtgggaaaacattttgtctctctgcatatgttatgtgttagaact

SEQ ID NO: 1345 - DNA, 211 bp, Unknown
  May be homo sapiens or mus musculus
gtaggggactttcctgtccatcacacccgtgcctccctgcccagccccgctgccttgcccgcatccagccgtgggacagactagcagttgagtgcagagattggccgggggtctgcaggccctgtgatcatgggtgctgccggccgggcaatgtcacgttcaggcctcacgcgtagccgacgctgtcttcccggggtgcgcggtcagtggt

SEQ ID NO: 1346 - DNA, 249 bp, Unknown
  May be homo sapiens or mus musculus
gtaaaattctgctattttccacctgtttccatgcagcaacccatggcaaagagtactgagaaaattccatttggtttccttgttttcccctttaccaattcctagataattcactaaaaggaatcctgagcctgagattcttcctccattttcactttaaggttagcagagattccagggaaaaagtggaaactgaaacaatgaccaaatggccactttttctttatgtaaggggttggcctcacatga

SEQ ID NO: 1347 - DNA, 194 bp, Unknown
  May be homo sapiens or mus musculus
gtgagtaaggttttctaatgtttactaatcactaggtcctttatatgtgcctttgtttctgattctcatgtacttgtctctcactacttcttaagggctcacctgtatctattttatctttgtgttcctgtaataataggtagggctttagacatagtagccagttagtctgttgactggattttctcattagc

SEQ ID NO: 1348 - DNA, 260 bp, Unknown
  May be homo sapiens or mus musculus
gtatgacaattaatggttctgcatgacctagccactgctgggggttttcttctataacgttgtccttgtgaaaacttttgtgaaattaaaaaaaaaggagttacaaattttattctgttattggtttgtttatttttatttatattgttctgtttgtggttttatttattttgttttgcttttccccccctcccctttccctctccttttcccttccttcttctcttccttccttcttccactttctaaattgctcagcg

SEQ ID NO: 1349 - DNA, 244 bp, Unknown
  May be homo sapiens or mus musculus
gtaaagttcacacattcttcccatgtctgttcagaaaagaaacctattcagatataagttaagctaatttagtaatcctagaattgtcctctgagagatttagatggatgggccacttcacagtagcagccaactcacgggagcacctgggcaacgctagtggacttttttgtagtgagtgtgttgatcatagaaaatgtagatataaggaaataaactttgaggatagagaattaacattatt

SEQ ID NO: 1350 - DNA, 219 bp, Unknown
  May be homo sapiens or mus musculus
gtatttcctagtttttctcatgccatcagttccttttcaagctgtgctttgttttcttctttgttctatggtttttgatgtagttgaggtgacggatggtgatgctggctattttaggctgcatggctttctgactactgttttagactccttcccccacacctacccagttcatttttgcttggttttcttttgagcttggcatcttccttaaagggg

SEQ ID NO: 1351 - DNA, 203 bp, Unknown
  May be homo sapiens or mus musculus
gtaattccgctgtgcctcctccgttggactgtgtgtgctctctagccttggttagtgtgagtgtgttgtgggtttgtttgtttgtttgtttgttttcttaaatcacttttgaaaaaacttgatgcttttttttttttggttaggtaataaaactatgtaacaaattctctaagacatatactaatgtttagaggtttttaaag

SEQ ID NO: 1352 - DNA, 237 bp, Unknown
  May be homo sapiens or mus musculus
gtaccataaacttagacagcatatctgttgtccgagctttaaattaattcttatagttccattgtaggcataagatttgggcttttagattttattttcatagtcatttttggctggtgaaaattttatttcactcatttgcatgatgtgctatgttaaaataactaaatcctttctaattcattaatctatttttaagtgtgatgcctgtgtgctttaataacactaaaataggta

SEQ ID NO: 1353 - DNA, 223 bp, Unknown
  May be homo sapiens or mus musculus
gtatctccttgggtcggtcgattttctctaactgtgagcggatcatggcatggttttcctttcttcttttcttctaacacgcactttgagctgaatcgttgcatgtttaggaggcattccgtctcacttcctcagcttgcttccttacttcctctgtgtatgtgaatgtctgtgtgcgttttcctgagagccagcgaatgtggggaggaactgaggacagagg

SEQ ID NO: 1354 - DNA, 227 bp, Unknown
  May be homo sapiens or mus musculus
gtatctctgtttttaaaattctaattcttacaatataggcatcataatattggggaaataattctataagaagggaaaaaatggggttaaggctgggtgtggtggtgtgtgcatgtagtcccagctactcaggaagctgaagtagaggctcacttgagctcaggagttggaggctgaaatgtactgtgattgcaccactgcactccagcctgggcaacataatgaga

SEQ ID NO: 1355 - DNA, 209 bp, Unknown
  May be homo sapiens or mus musculus
gttggtatcacattactgtttatctactttctcagcactgctgagaggcaaggcaagcctgggaaaaagagaaatgtagtcttcaagggaaatcatgtttcaagtagactgacctcataaatatactataattttttaaggtttgaaaagatgtcgagtcttgtcatttctgttgtgagttcagtacccaatggatgcaagctgagatg

SEQ ID NO: 1356 - DNA, 185 bp, Unknown
  May be homo sapiens or mus musculus
gtagttgtcctgaacaatttgctttccctattccctgcatgttcccagatgttctcatgctccacttgacctgcacaaacatcttgagcctggcttggctggaataaaaatttgtaagatattttacaccagtgctggattcaattttgtttttgtgttagagcacacaacacggcagaacaggc

SEQ ID NO: 1357 - DNA, 204 bp, Unknown
  May be homo sapiens or mus musculus
gtagctctctcaacttttcagacttgtggttttcctttccctttttccctcttcccttgttcctcctgcctttctcatttcctgggatgctagctttaaaatctctggaatggcatgggggtaggagcagtggaatttctgctgtgctctactcctcaaagtcctgaaggctgcctttaccactgcttgtttcccacaaacctg

SEQ ID NO: 1358 - DNA, 228 bp, Unknown
  May be homo sapiens or mus musculus
gtgagtagagagcaccacaacccctagagatggctcagaggcacagcaggagtcatcggagctgcagtgccagactaggggtgtggaccatgaaagccagtgcagtttttggggaatttaaaatatatatagacacaagctctccgtacccattaagatcattttgttgttacaattgatcataaagaggttagtgtgtcctctttttttaaggaaaaaaatgtattt

SEQ ID NO: 1359 - DNA, 261 bp, Unknown
  May be homo sapiens or mus musculus
gtaggaaagctatttttcctcatctgtattacagcctatgaatgtgttctctcgtaacaatggtagatcccctctcctctcctccccaaatcccatcccctaggcttgggctccccccaggtggctcagcagcagttcctaaagcatgcaggaacgtgtctgatggtgcaaaaatcatgggttggagacacacatgaaccgtccctagggcagcagcaaaggatcatggcactaaaaggcgtctctcaacctaacctggct

SEQ ID NO: 1360 - DNA, 240 bp, Unknown
  May be homo sapiens or mus musculus
gtactgtacccattccaggtgaggtggagagtgagaatgcctttgtttccctaccctaaccctccccttcaccagcactcagccagggacccactactgcctgcgttcctgcatctccctctgaggaaaaagaagctgcttgttggaataatccacaagtactttggaccccaaatccttaaaattaaagacattagctcacctagatttgaaatattgagcacactaatttctcagcaa

SEQ ID NO: 1361 - DNA, 231 bp, Unknown
  May be homo sapiens or mus musculus
gtaagctttcatatggttttggcatatgaagcttatgactgtcataagccataccaagcctgtggagtatggcatgattttcattacataatccaatgaaaatagacttattttaaatccctaactttgtagttttaatttgtatttcactatcttgaaattaacagctagtacttatccatcacagcagtctcctactgacatgaagcaagttgttgaatgcagtagagc

SEQ ID NO: 1362 - DNA, 222 bp, Unknown
  May be homo sapiens or mus musculus
gtaatggttttcactatttaatgaagcagacccatgcatgtgaagggtggacacctcaggtgacatgctttatagttggcctgagccttgacccagtggttcaacctgagtttggtcttggtaccattcaggtgtttgtgagctgagactgatgagtaggaacaggtgttttatatctcgtcttttgtcaaaagtaaagactcattcctttggtaacccaac

SEQ ID NO: 1363 - DNA, 224 bp, Unknown
  May be homo sapiens or mus musculus
gtgagctccacaagtcagtgcagatgttagcgctggcctaatcggaatgagctgcgtgtctccttatccctaaagtctgcagtagaagcatgctgtcttttgagctacttattacttctccctcttcctgcatggccccattgctttatgtctgattacctcggaaagtcatcttggcagcagctgaaactacacagaccataccttttattagagttcccacc

SEQ ID NO: 1364 - DNA, 255 bp, Unknown
  May be homo sapiens or mus musculus
gtactttctttcctgcctttcctacattctggaatttcattgatgttctaaagtgccttcctagaaattctaagcaagtctcatttttgttgcatgcatcacttgttgtaaatcatataaatgcactaatatttctaaacatgataattttaatacatttttgtggtcataccttttagataaagtagtggttttttttgtataatagtttaaaaattgtgatacctgttttctgtctgtaatctgaatcttttc

SEQ ID NO: 1365 - DNA, 161 bp, Unknown
  May be homo sapiens or mus musculus
gtaagtcattatggaaaagagccccaattatttatataatattctgaacctgtcaatacagtctgtagaaaacatgtagtcatctctgtgtaggagatggagcctgacgtgtgaactcttgccatattttatgcatctttccaatgggaaaggaaccatgc

SEQ ID NO: 1366 - DNA, 160 bp, Unknown
  May be homo sapiens or mus musculus
gtagggacctctccccggcccagaactgctctaaccctctgctcctctctcttgtcctctctctccatgctcccatccttctgtctctgtttctgtctctcaccttgtctctctctgtctttctgtctctggctgtgatctctctggtctctttttctct

SEQ ID NO: 1367 - DNA, 229 bp, Unknown
  May be homo sapiens or mus musculus
gtgagtaacactgaataggttggatgaatgaataaacaaccaattcaatagaatacctcaagtatttatttggtaatagttgccttctcatgatttgtataagtagtaagcaagatgcaaaagaaacaaccctttacttgatgagtcaaaacaattatctgcacatacacatatctagcaatattatttcagcagatgtacagtaatatgtttcatattttaagtgtaa

SEQ ID NO: 1368 - DNA, 231 bp, Unknown
  May be homo sapiens or mus musculus
gtaacaaatatttctacccctacacatgtagtgttttcctcttctactgcttctactactgtggggtgtgagtgtgtgttcctaagtgcatgaaattaacatttcctacttcacacacctaacgtttctcattttctccttaatgtttgaattcattgttcaggctttttcataaagctttcttttcgtaaagtggattgagacctcaaagtgttgtcgttgttgttttat

SEQ ID NO: 1369 - DNA, 176 bp, Unknown
  May be homo sapiens or mus musculus
gtgagatcagtgtcctctgtttgcaaagcaaaattttctgcagtgatatactgatatgttactaaaaagtggttgattaattttggagtgacatttatgcatccctgtgttgtgcttgttctaatctgtttctaatatattggtttcaatcccaattaattttattaagagaactt

SEQ ID NO: 1370 - DNA, 216 bp, Unknown
  May be homo sapiens or mus musculus
gtaaaccacaaagctaacaattcatgcactttcatggaattgttctccctctccactcttcctcatggtctgtggtgctgggcactgagcctcttcaatttgtctgtcattatgaccaagcgacataacccatttccattctttccctagggtcatcaggcttttcttacagttcatgggtctacctctgtggtaatgggtctttgtgtgtccttt

SEQ ID NO: 1371 - DNA, 329 bp, Unknown
  May be homo sapiens or mus musculus
gtaatgggtctttgtgtgtcctttgtatacctctaaacattttacttttttttttttaactttgtaaaaaaaaaaaaaaaaaaaaagggagatgctcttaaacacacacttgtttccactgggtaacagtaagaaatgaggaatttcatttaagccttactgcttcctacaaattgcataatattagattacaccaacatgcaattggccaagtttttaaaaacctgacttgtttttggttgtggaaaacactgttaataaagaagagttatttttgctatgggatggtggctttggagtgttgatttgactgctctgttgactttgaa

SEQ ID NO: 1372 - DNA, 188 bp, Unknown
  May be homo sapiens or mus musculus
gtgggtgttgcccccgcctgcctttgcctccgccgtggccctgagagtcctgggctctgccccgcccggtcccttgctccccactcagttctggatttggggctgcccctaacccagcccgttgctgctttgcaccttttcctgtcattgggcatcccccagtagtcaccccactccaccgaaaagta

SEQ ID NO: 1373 - DNA, 160 bp, Unknown
  May be homo sapiens or mus musculus
gtagtgccacctctgctaatttctgcaccacctttttcactttttaatcctctgctttcaaattttgcttaatcaaataaactctttaaagttaatttctttgggggaggtgtgggaaagtgggaaagtgattgagaaatcaacattttgagttatttga

SEQ ID NO: 1374 - DNA, 238 bp, Unknown
  May be homo sapiens or mus musculus
gtaagtagtttaccaatctattaatccttccgagggcctccagaatcacactccccccaccacggaatgtgcattgtggttgttgagtgctgagaatgctgagatgacgtggacatccctctgccacctgcctgcccactctgccacctggagcccatccctcctgagatcctaatgcattcagcgcagcttgggtttatatatgaggaggcagtattgatctgagaaggactacaaa

SEQ ID NO: 1375 - DNA, 199 bp, Unknown
  May be homo sapiens or mus musculus
gtaagaaaatctttactttttgctaattagcagatttttttttttttgaactgtaagtgccattaagagtgggagagggccaggcacagtggttcatgcctgtaatcccagcactttgggaggttgtggcacgtggattgcttgagatcaagattttgagaccagcctgggcaacatggcaaaaccccatctctacaaa

SEQ ID NO: 1376 - DNA, 182 bp, Unknown
  May be homo sapiens or mus musculus
gtgatacttcattcaggggttatttgctaaatatgctgtatactaagtatgctatgtgtagaaaaagaatcatgacagaatttgtgctcttaattgtagcaaacattctaataggtagcaaatttctaagacattggcttctaaaaggaatacaatttctagcagtggagagactactgaca

SEQ ID NO: 1377 - DNA, 190 bp, Unknown
  May be homo sapiens or mus musculus
gtaaggcctcagcagggacctcatctctaactgcgtggaaacctgatccttaatgtcactgaggagtatgtggttctccagaggtgggcctcacaggagcttctgcggttgtacctccaccgccccttgccacagtctctctggctttctgtggttatatctgagtgcattccttaaaagataaaagagg

SEQ ID NO: 1378 - DNA, 255 bp, Unknown
  May be homo sapiens or mus musculus
gtaagaccgagacctctccaccgtctttctgtcttgattccggctgccttctcttcttgtaattgtgcttaattcctgatttccctccatgttgaagagtgactgatgaggcacacaggcgtggacctcactgccccagttcccccatgaatgcccagacttcccaccaccccggctttttctctacccagtcatttagctatttcacattacctgagaggccaaggcatggctggctggcacccgggagacttc

SEQ ID NO: 1379 - DNA, 172 bp, Unknown
  May be homo sapiens or mus musculus
gtgagacagaagtagctgagactccattcctgagatcttcacttaacaactcctgcagcttgtgcagagccttactagaaatactgaaggcagaagtccctggaaaatagggcccataactaattagtaatttgtttttgagtaatttgttaccgttatttgagcacattct

SEQ ID NO: 1380 - DNA, 334 bp, Unknown
  May be homo sapiens or mus musculus
gtgaggccgggctcaatggttcacacctgtcatcccagtttgagactgaggagggaggatcccttgaaggcgagagatggagaccagcctgggcaacattgctgtagagatgacatcccatctctacaaaaataaaattaacaacctggtatggtggcatagactgttcccagttacttaggaggctcagcggggaggactgtttatgcaaataggaagctgcaatgagccctgatgatcctgctgctgcactccagcctgggcaacacagcaaaaccatctctacgaaaaaaaaagttcccactgactggcaaggaaagccaggaaggggggc

SEQ ID NO: 1381 - DNA, 255 bp, Unknown
  May be homo sapiens or mus musculus
gtagccccacggcccttcccctgatgcatggacgcccagcctcctcctcccccgctccttcctctgcgcagtgtgctgcagccaggccgcatcttgctgtggtttggaaccttcttgtgtcctgttcaactcagaaaccccacagattcttgcttttctgcaggcttggcctctaggttggctgggttgcagagcagtcttgcttctaggttgtcatgagctgcgtggcttccagagctctggggataggaaaca

SEQ ID NO: 1382 - DNA, 225 bp, Unknown
  May be homo sapiens or mus musculus
gtgaggagtcaccagccgagccaagcctgctgtccaccccagcccctacctgtgtaacagctcatgtcttcctcttgtgacctgccgagcctttgtgaatcagacagtacaaggccacacgctttctttctggcaggggtgccaaatttcccctcctatttttgcataatctctgtaagccacagattcccagtcccaaaaatacctccctgtccccaggcctta

SEQ ID NO: 1383 - DNA, 218 bp, Unknown
  May be homo sapiens or mus musculus
gtatttctgaattgtgctgtgtgcatgtgtgtttgaaagctcaaacagcttgtcttcttacagcatcgagttgtttgctttattgttagacacaatattagcagtgtatcctttccgtattccctaccatcgaacccattaagatctaaaatccttgtcaagtatctggctttaaaagttgggagatggtagtttaaaaaaaaaaaaagctcttgcaa

SEQ ID NO: 1384 - DNA, 223 bp, Unknown
  May be homo sapiens or mus musculus
gtgagtaccgcagcccagcccgagggcagccgctgacactgccttcgcagcggtccccggatggcctgctcctgcctggcccagctgggcccactctgctctgaggatgggccaggcctatgcgcctctctctccactctctctcttttgggcctaggtctccttgcctctctccagatgggagtgcgtgcctgtctgtcaggcctgggccaaggggagaagc

SEQ ID NO: 1385 - DNA, 198 bp, Unknown
  May be homo sapiens or mus musculus
gtgagtaccgcagcccagcccgagggcagccgctgacactgccttcgcagcggtccccggatggcctgctcctgcctggcccagctgggcccactctgctctgaggatgggccaggcctatgcgcctctctctccactctctctcttttgggcctaggtctccttgcctctctccagatgggagtgcgtgcctgtctg

SEQ ID NO: 1386 - DNA, 250 bp, Unknown
  May be homo sapiens or mus musculus
gtaagtaccatcttatttaggaggaatcatggccactgtacactgaattctgataacctgtaatgcgaattcacaatcacttctcttagtcatttctttctatgtgataaaataccctccttaactgctgatatcgaagagtcgtctcagtctgtggagggtttcattataaaccagtggagatttgccagacatccttgggaggtgacttcttactctattagctaggaaaattggcacaaagcttcta

SEQ ID NO: 1387 - DNA, 167 bp, Unknown
  May be homo sapiens or mus musculus
gtggccatttgttttcgtccttggtgtttctgaatgtgcccatgtgcctttccttaccctttttttgggcgtgagtgtgtggttgcatccagctggctttgccttcaacatctcaaaggtgtcttcacttattgtcctttgtgtctgcttggcatatctgtcacatg

SEQ ID NO: 1388 - DNA, 165 bp, Unknown
  May be homo sapiens or mus musculus
gtgagacggctacctcatctaactggactcactctgtcctgtgactcccattctttcttctctcttaactctgccttcagtttcgcagccacctcctctctctgatcagtcgttgtgttggtagtgaagggtgttcttgtgcagcctttctacctgcttctctgt

SEQ ID NO: 1389 - DNA, 253 bp, Unknown
  May be homo sapiens or mus musculus
gtaagtcccgtccatgccctgttctcgctggctctgcctccctgcctgcatgtctgacctgtgtgtgcgggcattgggagggggctctgtggatgtgagggtctgtgcgtggggtctggttgttcatttactcacagaagcacagcctatggagccagactcgggggttcaaatggcagctctgccaagtgaccttgagcaagtcactcaaggtctctgggcctggttttcctcttctgtaaaatgggtatag

SEQ ID NO: 1390 - DNA, 334 bp, Unknown
  May be homo sapiens or mus musculus
gtagggggcgcggggcggggcgtgagcgcatgaacaggctgtgcacgacgcatggatgcccctcctccgagccctgcccctgccttcaccagaacatgccatcatccccatgggggggcgctgcgccaagcttggctctggactgttccattatggcttggcggtggggagggtagaggggatgcgatgtggaagcccagactgttgcatagtcagccttatgcatggaccatttcatcatcgtgggttgtgggggctctaaggggcttcaattctgtagctcaggagagactgagcagccggtgtccctatagtggagggggcgggggctaca

SEQ ID NO: 1391 - DNA, 221 bp, Unknown
  May be homo sapiens or mus musculus
gtgagtacacgtaggtgctggctgaggagcaaagagttcctttccctgcttgtccgagacactgctaggcggaatgacctgcttttcctcctctactgtccttgtgatcctttcttctttctttcctcttccttagttaccccttgtccccctctgcatgcttgaattttggcaacttcgaatttttatatattagaggaaaaaaacaccacttcactctg

SEQ ID NO: 1392 - DNA, 212 bp, Unknown
  May be homo sapiens or mus musculus
gtaccggcagtgagtgctgcggaggggcgcagaggcccgcgccctggctggccctgtgcatgcgccttgcgccctgctcccaggtgccactaacccgtaatctggctctgtgtgcagtgctgcccggcagggctgtcgtgtgcgtgttgggtgggaaggcggaggcggcgcggggcgggctggcctctgagcatctggctgcatttagcacg

SEQ ID NO: 1393 - DNA, 195 bp, Unknown
  May be homo sapiens or mus musculus
gtattgaatagattttttaccttccctgttttataatgaatttgattctttgtgaaactgtcctaattttattttgcttaagtttataatattgtatcacgtagtaaggacaagagttatattttactgtgacacctcatttatccagtatctttagtgaaagaatattctgtgtgatgttctatgtaccctgag

SEQ ID NO: 1394 - DNA, 161 bp, Unknown
  May be homo sapiens or mus musculus
gtagtaatttctaatctttgcacctccatcactggcaggtggcttccaggccacaacacaagaatcttttgtgacagcagtaatagttggtttgccaggagcacctggcttttctattaaacaaaaaaaagatttgagtcatgagatgaaacaggcagctt

SEQ ID NO: 1395 - DNA, 233 bp, Unknown
  May be homo sapiens or mus musculus
gtaccaattcacagacgtgtggtctcacgatattaacccaacttaacttaaaaaaaaaaacaacatcctaaagaagaaattcaaagtgcatgcttactgtaaataggctccagggtgtagaagaactcacaatggcaggagtgccggcatgggtgtacactcaccattttcccaaatgcattgtttgaaccaagattgaaaatgtaactgcccagtagaaaaggttactaaca

SEQ ID NO: 1396 - DNA, 212 bp, Unknown
  May be homo sapiens or mus musculus
gtgtgtattccctttgctgctctctgcatctctgcttccagccccagccagcatgagggcctagggtggcatggtcagggaggggtgaaccccagggtacctgctctgctttcttctcctttttggggggcagaaagcactgctctccctcagccacagggccctgctcgtagatgtgggattctgtctgcctctgagcccacactcctggc

SEQ ID NO: 1397 - DNA, 198 bp, Unknown
  May be homo sapiens or mus musculus
gtaaggcccccgggcctcgccctgctacaacccaccaatcagttggctcaatcagttccctcactcgccaccatgggcatcccaactgcccccctctgtggcttctgtgtaccagaagttgctcccctgccaaaatgtccagtgatttcctaattgctttcaattaggggaaaagtgaggtgggaagggatgggcttt

SEQ ID NO: 1398 - DNA, 172 bp, Unknown
  May be homo sapiens or mus musculus
gtgggggagctgctccagggctgagcccaacagcttctgctggcctgtgccacccctggatgcctgcactcttcagaacatgacttacaatgcacacatccctccacctatgtaacagggcacagatctcatgctgagccacagtaggcaggcctgtagctacatcagccag

SEQ ID NO: 1399 - DNA, 290 bp, Unknown
  May be homo sapiens or mus musculus
gtgggaaatgcactctgcatggatggggaggatcttatcctcttttgtttattctttactaattcttttgttcttggagtgaatgaatgtgctgggcctctaaaaatgtgcttattttgtggggaagcatattttgacatttttctaatttgcggagtatattttgcgtgtctgcttttggcatttagaaagtgcttttaataatttcattaaaatttctgaaatttgagaaaatagttgaaattgtaaattattttttcctttgttttaaaatcatgtaggatgtatgc

SEQ ID NO: 1400 - DNA, 228 bp, Unknown
  May be homo sapiens or mus musculus
gtatgtaaaccagacagcttcttaaggattttgggtcatctcccagttgctctcttcttaaactatcagcacaagtttgtcatctatcacctagttgtggtttcttttgttgctgcggttgttttttagtggcattgctttattcatcaccttcatttcatctaaacttcttttacctaagtgacaaaggctattcttagtgtatagttggtgaaaactccaaataat

SEQ ID NO: 1401 - DNA, 223 bp, Unknown
  May be homo sapiens or mus musculus
gtaatggagtagtcctgtggtgtggatcgctggcatctcattgcttctgcctcagtaatgactgtcttaattgtgatgatagcagctcactaactctgcgtttgtggtgtgatgagcagctagtgtagagtagctgaatgctaataattatggttcctgaattaattaaaaagcggatgtttaacttcacccattatttcctcctgcttttcccctttttcaa

SEQ ID NO: 1402 - DNA, 199 bp, Unknown
  May be homo sapiens or mus musculus
gtgagtattactctttcttgcctgctcgtccactacattctgctcctcaaccccttatttattttccatctctgcctctcatctgcctcagtttggtttcctcctgttcttttctctctctttctttgtattcttttgttttgctgaccccttttgcttactctgtagtctttgccctttttccattcttttgtttgct

SEQ ID NO: 1403 - DNA, 144 bp, Unknown
  May be homo sapiens or mus musculus
gtaattaggaactggaatttagagtttgggaatgttattttgacaacgaaattacttatgtgaaatcttttcttctactttcccaaaggcatttttaaaaaggcaagttgcatacttctctgattttttttttcctcttaagaa

SEQ ID NO: 1404 - DNA, 256 bp, Unknown
  May be homo sapiens or mus musculus
gtaaatatttgagtaatgaattatttcgccttccttaaaaaaagacgcagcttcacgcatgtgactataccagcttcatttaatgctgtgtggattgatcattataattcatgacattctatttagtcttgtggtgtgcttttatgttttccatcttcccttagctaaatgctatatggctttaaaaaatacatatgtatttataatttataatggcagattatattaaagtaacttattttcccagaaatgtctg

SEQ ID NO: 1405 - DNA, 150 bp, Unknown
  May be homo sapiens or mus musculus
gtatgcaatagtcttaatattaatttttcaagttacaagggcttaagattataaaaatttgcttaagaatatatttctatatgatttgggtatatattctcttatgtagggcacaaatcccaatttaaatgaataaaaaattgcctttga

SEQ ID NO: 1406 - DNA, 225 bp, Unknown
  May be homo sapiens or mus musculus
gtaacttgagtggacctgtggacaccatcaggtcacaagcatgaaaaaaatgtctatgtctgctttctaaatatattatacttacatgtacacatgtgtgcatatacattcaaaatttgcattgcataaattgtttattcaactaataagactactactattaagaaaatgcattcttccttcacagtgtgttagtaacttgtctaattgaactaatgttgtgtc

SEQ ID NO: 1407 - DNA, 206 bp, Unknown
  May be homo sapiens or mus musculus
gtatgttagcattagcctggaattcaggtccctcactgttttactctctatcttccttcctttcatcctgccatctttcctagcctaaatacaaactacagtgtttattctctaatccagatttggtaggttgaagctatttcttacacagagctatatttcatgtaactgattctaaccaggttttacctgtagcaaacatgtat

SEQ ID NO: 1408 - DNA, 228 bp, Unknown
  May be homo sapiens or mus musculus
gtatgaaatgaaattgggctttggttagaagctcattgatgaggactacagtagaatttaacctagagattgaaaaaacctgtccttttgattcttcttgagcatttacacagtatgaaaaatgagtcagtaggagacagagacttccataggaaaacctgacgttgtgcctggaagaactcttcttttcagcaaacactaggcttgtaaaatgtataagtaggaact

SEQ ID NO: 1409 - DNA, 249 bp, Unknown
  May be homo sapiens or mus musculus
gtaggccagtattgcctgtcctgcatgttgtgatcaattgctgaaataatgcagtcttgaagtaaaacattaactaatagtttgcaaagtaggagtgtttggcctgtgtgaacctaaaggtcagagtgtctattctgtctatagtggaccagaggtatacttggagtcctgccattttatgttgtagtcagtatcctcaccttcatctcatgaatgctcctgatcaagaaagagtgagaaaatgaatgt

SEQ ID NO: 1410 - DNA, 167 bp, Unknown
  May be homo sapiens or mus musculus
gtaaagctggtaaattactgattatctacaccctttcccttttctgtccttccttgactttttccttccacctttcttaaatttttgttatcctttccacaaagattccctccttatgttcatcaaattcacttgtgtctttgtcatagattgtttaaaagggattg

SEQ ID NO: 1411 - DNA, 231 bp, Unknown
  May be homo sapiens or mus musculus
gtgagtacctaccacctcctcaccatgctgtcttcactctttctgttttcattatttcaagaaaatccagatccaaaccaactcactctccttgcttcaagttttttagcattggcttgtctgttggttctgtctgtgaaacccagtgtgagaagtccagtcactttttatcagcctaaaacaggttagacaattaagccatttgtttgtgataaactcagatttgtctgt

SEQ ID NO: 1412 - DNA, 260 bp, Unknown
  May be homo sapiens or mus musculus
gtaaattggccagtcccctttctgttgtacctgcaacagataagggctctgctgggtgtattcatttttttgctgtagcttgtacagagtgtgtgggtgttgagctaacagttgtggctcagtattaaccaaaatgttcttgctttaaaggggaaaatgtccttctatggtttgtttgtttgtttctttcccttaaagctatgtttgacttttgtatatgatgaatactataatcacagaaaacaaaaggattatatatt

SEQ ID NO: 1413 - DNA, 223 bp, Unknown
  May be homo sapiens or mus musculus
gtaggagtgacttaaaacaaattgatggctgctggccccccattcttctccttcttctgcaatatgatttctcttttttgtcattgtgcccatgacatgtccctttctatgatttaaattctgtataacctatctttagtggaccatttctgacccttgtggtatgtgacttttatttttgagtgatgtttttatatctttccccttaaagtgctgtgacctt

SEQ ID NO: 1414 - DNA, 183 bp, Unknown
  May be homo sapiens or mus musculus
gtttgggttagcatggggtgatgctttgccaactaacaccataaaaatttttccaattttaagaaaagaaggggagaatccctacatctaccctaaagaggatagaaaactgcctactctcctgtattataatactttggtcaagtaatggatctattgaagtatcatccctgaagtatcctc

SEQ ID NO: 1415 - DNA, 205 bp, Unknown
  May be homo sapiens or mus musculus
gtattcagaaagaatcaacatcatcttgctttaacaagactatacatctcatcaaatattcaaaaaaattaattcgttatctaaaaataggaaagaaaattctaaccattttctaccacacttccttttgggcctaatttatctagaactatggacatacttcttgcaaataaaaatgaatgacatcttgaaagagaaactaatg

SEQ ID NO: 1416 - DNA, 194 bp, Unknown
  May be homo sapiens or mus musculus
gtaacgactctgtcccatgccggccggcacaagagctccagctccaaggccctggccgcgcgccctgcacgccccgcacgcccagccctgctcgctcccgccccggctcgcgctccactcggggccgcctcggcaaggctggcagctccagcctccacggtgaccgcccgcttcgagccctgtggcctgcgccg

SEQ ID NO: 1417 - DNA, 181 bp, Unknown
  May be homo sapiens or mus musculus
gtaagtatccggctctgttctggccacagtgtacctaacagtgatagcatggtttcttttcttttcaaaagtccagctcttgctgttttatttttactttcctgaaggcactatcagatttctcttttaaagacaagcatctaaaacatgttctaattgttgtggggtccaatccgccagt

SEQ ID NO: 1418 - DNA, 244 bp, Unknown
  May be homo sapiens or mus musculus
gtaagctctatggaactttctgcctcattgatccctataaaaggtttgcattttattgttttgtaagacacatttcactctcttttatataaatatatatatataaataaaatattgctgagcagttagggtaacaatgctgtaaagtagatatttcttgaaatctattgaatattcctgatttttgatggagaaacatgtagtttatagattaggtttgccagagttttacattgtttatctg

SEQ ID NO: 1419 - DNA, 237 bp, Unknown
  May be homo sapiens or mus musculus
gtacggttggattcctcccgctgctgtggtttgccccgcatgcctgtcaatacccatctgcttctgaatgcatccttttgttgtgttctgataaatgcagtgaaggcaccaccaaggcccttagcagtctgactattaaatgcaaattcactagcagcctcccgagagtcctgttctgataaattacgatgaagggtatgtctgagtaaggaacttctgtgcgttacgacgccgagg

SEQ ID NO: 1420 - DNA, 241 bp, Unknown
  May be homo sapiens or mus musculus
gtgaattggttgtaaaatatacctttggaaatctttgaataattgaatacaattaatgaatggacattaacaataatgcatgtgaacttcaaagatgatgatatcccaaatctgatcaggatcattttttttatttggcttcttaattgaatcagattttacaactgattgaatttacgtgattacacaagtagcttggttataaaggctgtctgttttatatagacataaagaaaacaac

SEQ ID NO: 1421 - DNA, 244 bp, Unknown
  May be homo sapiens or mus musculus
gtatgtttttatagcttctaaacatgtcagcagggtggctttttaaattgctgcgctaaccctttcattgtgcattaaaggaaaagtttattaaagataagtggaaaaaaatgtagtctagaggaacttaattatattgtcatttgcctgttataaaatctagcaggcaaatgaaataaaataattgctataaaagatttataaactttgtgaggaaagaagaaaagatctcatcgttaagttt

SEQ ID NO: 1422 - DNA, 252 bp, Unknown
  May be homo sapiens or mus musculus
gtaagtacccctgatatttctcgaggaaatagaaaacccgggtattgtctctaaaatctgcatcaatatattccacggcactgtgtctatctatccctgtgccttttttgaaggctgaagttgaggctcgttgtgcattctttttcgttagattccatgatttccttgtttgttgctaaaagtaactttttagatagtcgtatccgtttgccatcagctattgaaatcactcctgactcgttcctgtcacac

SEQ ID NO: 1423 - DNA, 160 bp, Unknown
  May be homo sapiens or mus musculus
gtatggctcatcagaactgtattctgttgcccttcactgctgctcggccttactgcgctaacctcattcatggtgcttataaaatcgatacattctgatagccgtttggtgccccaacgggccagcttccttcctgaatgaggcattaggtgcaaatctt

SEQ ID NO: 1424 - DNA, 185 bp, Unknown
  May be homo sapiens or mus musculus
gtgaagcccatggtgcccaggactccgaggcccatgagtctgacacgccctccaaaaggggcctaatatcactccacattctccatttcctctatcttaaaagtttaggagagctttacagatatttgtatgtctttttattactcccagaactgctatgaggaaaaaaacccatgatagctact

SEQ ID NO: 1425 - DNA, 199 bp, Unknown
  May be homo sapiens or mus musculus
gtaagtttctcttctgacgttttccttgtctgcctctctgagatactgatcatgttcctggacaggatgagaataaaacctgtgtaactcccatggccatgtatcatggagtttttcattctgacttgttgagaatgaaaacagggaaaccagatataacccccactcctactccaaagtagctaacgggaggaaaaaa

SEQ ID NO: 1426 - DNA, 195 bp, Unknown
  May be homo sapiens or mus musculus
gtatgtatgtatttaatataatttatggaaccataagatttattagatcaatgatttccaaactgcaagtcaaggtccaatagtgaattgagaaataaatttagtgaatagcaatcagtcttttttgtagaattttaaagatagtaaatattagacttgatttcaagtaatgtataggttttgttgacatttgtt

SEQ ID NO: 1427 - DNA, 239 bp, Unknown
  May be homo sapiens or mus musculus
gttggcaacctctctctttgcctctcccctctttccttttctctttcctacttttccattcttgcttcagtcatttgttttaaaataacatgcttcatccatcgcgtatggcttaactcatatccagctgagctggtgcttccaaatttaaattctgaaaatttgatgactttggttgtgttacacatgcaggtgttataagtgatcaaacacatgctaacacgttgctcaccgggttc

SEQ ID NO: 1428 - DNA, 261 bp, Unknown
  May be homo sapiens or mus musculus
gtaagaattgttttctatgtatgtcatatgttctgaaatataatttcaatcaattacacatatgattcttgatgcaaagagatggtttcaaattacctaaaattgtaaaataatatccagattctattaaaaacaaacctcacaatatatgaattttctaatctagatgtaatgtatttgctctttaattttcactgcatgccttattttccaatcatttttaatgaatacttaaaaatatattaaaattctgagtgatct

SEQ ID NO: 1429 - DNA, 225 bp, Unknown
  May be homo sapiens or mus musculus
gtactgcgcctcccaccaggcgatgtcctcctcctcctccccttccttcatttcttctctctactcctctgcagccagggcggggacatggtctgggggcctcttggggagcaggcaagagttaggctgggcagatggaaccccacttgggcacagcactccttctcttgcagctgacgcacctctcctgccacgctggtttcatgattaactaccttgttcttt

SEQ ID NO: 1430 - DNA, 188 bp, Unknown
  May be homo sapiens or mus musculus
gtagatgtgtctcgaccagcgtcccgcccgctcccgcccgtccctcctgccagcatgcagccccctgctgcacgcagccgctggccgggctccagagccgccccagaggccgccaggcccccgggagcccctgctcccgtgtggtcacatcccagcagagcccaccacaagggcagggaggcagcccc

SEQ ID NO: 1431 - DNA, 234 bp, Unknown
  May be homo sapiens or mus musculus
gtacagtgaacctggggcttcccgctcccgctgtgaggctgcactatgcatggctctggggtcagagctgcacagaggtgatgtttttgtgccagactccaaggaatggaagtttggcttggggccctcctgaaggtgcatgcgaggctgacatgagattttggtttggtttcttgattccctggttggttcagataagaatgcttcttaggagaatttgctgtgtggctctaa

SEQ ID NO: 1432 - DNA, 195 bp, Unknown
  May be homo sapiens or mus musculus
gtaaggagtgggcagtgctagcaaaattcccggggcacttctgtccattatctcaatacctggggttgacatttcctgtctcagatcaggagtcctgactaccctgcctctgaccactcgaactgagtgctgcttagctgtatcgtagacaccgcctgtttgtgaacagacaccctgcttcttgatgataacaca

SEQ ID NO: 1433 - DNA, 246 bp, Unknown
  May be homo sapiens or mus musculus
gtaactgtgaatgaaggtagccttaacagtgctttcaaatttgctaaatccaagttgggattaagcttctgttcttaaagcttataattaaagctgcctttcctgacatcaagcttccagagcatgaaatgagatgagcatcatttcttaataagctggagcaaaaatgttattaatgatggtagagggtgtgtattggctaaccaaagattgcaaagtcaattatggaatcaagttaataatcag

SEQ ID NO: 1434 - DNA, 172 bp, Unknown
  May be homo sapiens or mus musculus
gtaagtagctgggaccacaggcggtgcccaggtttttttttttttttttttttttttcgttggtagagacagggtctcactgttgccaggactgctctgaaactcctggtttcaagtgatccccttgcctcctcccacttaggccttccaaatgctgggattacaaggcatg

SEQ ID NO: 1435 - DNA, 225 bp, Unknown
  May be homo sapiens or mus musculus
gtatccgactaaactgtgctaagagcttaatgcttactctctgtcccaccatagtctattggttagacttaaaattggtagttgaataatttcagaaaggctctccatccgccccttcagttttaatgtatatgttttctctggacctgttgcgtgatctggcagggtgctgagggttggatgtgaggaaggagaggccatgtttctttttctgacttttgactg

SEQ ID NO: 1436 - DNA, 258 bp, Unknown
  May be homo sapiens or mus musculus
gtgatgatctatgtctgtctagttctaggacttagtaaaatctagcttggctgattaaaaaaactttaattttatcttttaaccaataagcagaagccattgcggcagccttcataagctaaaatactgctctgtgtagactgtattggtagcttatgttttgaatttacattgtagtgtgctgcatattatttggattatattgtatatggtaacaaaataagctctgctttaaagtctttcttgaatttttttccc

SEQ ID NO: 1437 - DNA, 191 bp, Unknown
  May be homo sapiens or mus musculus
gtaagacccccgtctctactgaaaatacaaaaattagccgggcatagtggcgtgtgcctgtaatcccagtttcttgagatgctgaggcagaggaattgcttgaacccaggaggcggaggttgcagtgagccgggattgcgccactgcactccagcctgggcgacagagcaagacgctgtttcaaaaaaaga

SEQ ID NO: 1438 - DNA, 227 bp, Unknown
  May be homo sapiens or mus musculus
gtaactactaaatttaccatttttgtggcatggataaaatggagtgctatgcaaatactgttgcacgtgagatgatttctaagtccttgcttgatccgtgaagatcaaatagttaaatactgggcatttgggctttaacccttagcggttgatgcatgatggtgttgattagtgctttgagatgtgtcaacctttcttttttatactaacagcatcattttgaaatt

SEQ ID NO: 1439 - DNA, 168 bp, Artificial sequence
  Synthetic
gtacgacaggaaagcagtcatctcagcttaccttgctttgtgttaagagcatgacctaggattgccactcattctggttgaaatatcttgccgactcaccttctaacttcccgaatcatttttttcaccttcactcttgaaagataacttcagtagattagggtctta

SEQ ID NO: 1440 - DNA, 181 bp, Artificial sequence
  Synthetic
gtagggacttctgcatttgtgtgcttgcgattggcagccccacactgtgttgctctgcatggctcgggctggatggcagagtttaaaaaaacaacacgggtacacgttacaaatgtaagagggagggaaagctctgtttgcttattttttggaaatgtatttactgttatttctgtggtgt

SEQ ID NO: 1441 - DNA, 251 bp, Artificial sequence; identical to SEQ ID NO: 1331
  Synthetic

SEQ ID NO: 1442 - DNA, 194 bp, Artificial sequence
  Synthetic
gtatacatctgacagtagagtggggctgggatcttggcttgtgggtggatgggggtacaagctatgcatagtggtgtgctttggttttatcctttggaaactagaatctccacccttatctttgaaacattggtgctggttatttgtttggcaaaagctttggaggcatggccgggcgcggtggctcacgcctg

SEQ ID NO: 1443 - DNA, 140 bp, Artificial sequence
  Synthetic
gtacagaatgtcaagtgtccttaagcagctgatagaattgttttttaatactgctactgtgtaataaggtgcttcccttttcccattcaaaaagagagctaatgcgcttgcagcttacccctcctttccttgcatatggg

SEQ ID NO: 1444 - DNA, 179 bp, Artificial sequence
  Synthetic
gtacgtactgttttttcactttatggcacggttttaccaattggaaaaaagtaatttttataccccaaaagggtgtaaaacattggtgattatttttgaaaaagggcttttcaaaactgagccatattggaaaaaatcagcacttacccgatcctgtgcaagcaggctctaaacaacac

SEQ ID NO: 1445 - DNA, 209 bp, Artificial sequence
  Synthetic
gttcgtatgccctctttcttttctctgcacgagtgagtgtgtgtcagagagccgtgtaaccaatggtgtggctttgcattgattctgcttctgttgaagagtcttcctgcttctttctgttctggtcattgcatggctacagagctgtccatgtgtaaaaatggagtatatggaagatcgtaagtgcactcttggtgttggccatgtcg

SEQ ID NO: 1446 - DNA, 217 bp, Artificial sequence
  Synthetic
gtaggttgcctgagagccgcgagaccctccccactaaaacaggactcaccaacccgccgagaccctgccggtccggctgctgctccgcggccatttaaaccaccactaacccccacgtgtgctcccggtcggtgcacagccacattcccgtgtagcctcggccccatgtaacacggcacctatcacgtgtgtgtgctttccactctgggtggaggct

SEQ ID NO: 1447 - DNA, 246 bp, Artificial sequence
  Synthetic
gtaggcgccaataggccacttgttcctctttccctccaccccctcagtttttttcttctcccttactcccttttccttaaaaaaattataaaatgaaggttcaaacaaacttcaatgagcaacattttatcatttttctttcttttttaaattatggcaaaacagaagcttgcagaaaaaactgaagatctgataagaatgaggaaggttagccatttttcactttcacaaaactacattgccatt

SEQ ID NO: 1448 - DNA, 224 bp, Artificial sequence
  Synthetic
gttagttgtctttgtgtgtgtgtgaagccataaaatctaatgttacgtgtgcggtggtgctgtgaggtatgcttctcgtgcaagcggctccctcagccctgctgtggtaaagaccaagtataaattgtcgctaacagggttttctcattagagtcgtgtgcctgagtgtcccctgtgaattataatgcctccagccctcttgctgctcctctgctctgcctgtc

SEQ ID NO: 1449 - DNA, 255 bp, Artificial sequence
  Synthetic
gtaggtttaatgtaatctttttgtttccctttacttctgcagagcattataaccagtcatatcaggagaagcctgaattactactcatttttcaatgccaactactcactgctttttgttgttgactcttgcagtttcctttaagctcccttctttcagcaatcatttgcaggggaaatgacaatcttaaaatttttctaagtgtgggttcagattgaatcactttgcatgtattaacttgaagggttaatcatg

SEQ ID NO: 1450 - DNA, 198 bp, Artificial sequence
  Synthetic
gtaggcagcccacgtgtgaccttttgggagtttgtcaaaacctcagtagagaatgaacccccgaggcccaaatgaaataaggcaggatttgatgaggaactgccgagaacgttcccagtgacatatcttcccctcaaaggatggtatatgtgacgttctttccccacgataccaaagtgatgtaaattgtgtgattac

SEQ ID NO: 1451 - DNA, 385 bp, Artificial sequence
  Synthetic
gtacgcgtttttgtttttgcatttttaaaaaaatcttgaattcaggaaaatacatgcatgacttttggcttggaatggtttggctttttgtggacggcatgaagtggcttgagatcaaagcttgaatttttttttttttttaataaagtcctgaatctgagactgcgttattttcagctccaccaccactcctctcccccacctctcccaataaaacagtctatttggaaagacttcaaaacatttattcatccagccacagtaatattagtggtggtaattttcctgccttctccggaatattttaagccatcgattttatgtttgcattgttaatacgtccttttgggtcctaagaacctctgcctaaagtataaagccgtat

SEQ ID NO: 1452 - DNA, 222 bp, Artificial sequence
  Synthetic
gtaacgaagaagaaagccaatgaaaaaaataattcaatctgtttctcttttaatcattaagataattcattcattcaaatctgttttcttgtaatcatttcaaggctgaaaatattcacatctctatggatcatgggcgttatttttttgttttggggggtttggttgctttttttctttcctccttctggtaattcttggtcgaaagtaacactttggccc

SEQ ID NO: 1453 - DNA, 130 bp, Artificial sequence
  Synthetic
gtacggagctgtaggctttggattggtgtgtaagaaatatgcgtggcccgcatgtcttagaaatgtaattaaaggaacgatttagttatagtccacttttttggggggatgtggttttgtggagtaacat

SEQ ID NO: 1454 - DNA, 227 bp, Artificial sequence
  Synthetic
gtaagcgacagatacagatgcatgcggcacccggtgcaaaggtgccgaacagcagatgcatcctaaagtcttgaatgtctgtcgtttgtttgacaaacaagtcaatgccgtgagttgttccagaatgcgtggcattttgttttgtcatagcacaaggtgctgataaccacatgctggcgtgcgtgggaaaacattttgtctctctgcatatgttatgtgttagaact

SEQ ID NO: 1455 - DNA, 211 bp, Artificial sequence
  Synthetic
gtaagagactttcctgtccatcacacccgtgcctccctgcccagccccgctgccttgcccgcatccagccgtgggacagactagcagttgagtgcagagattggccgggggtctgcaggccctgtgatcatgggtgctgccggccgggcaatgtcacgttcaggcctcacgcgtagccgacgctgtcttcccggggtgcgcggtcagtggt

SEQ ID NO: 1456 - DNA, 249 bp, Artificial sequence
  Synthetic
gtatgtttctgctattttccacctgtttccatgcagcaacccatggcaaagagtactgagaaaattccatttggtttccttgttttcccctttaccaattcctagataattcactaaaaggaatcctgagcctgagattcttcctccattttcactttaaggttagcagagattccagggaaaaagtggaaactgaaacaatgaccaaatggccactttttctttatgtaaggggttggcctcacatga

SEQ ID NO: 1457 - DNA, 194 bp, Artificial sequence
  Synthetic
gtacgaaaggttttctaatgtttactaatcactaggtcctttatatgtgcctttgtttctgattctcatgtacttgtctctcactacttcttaagggctcacctgtatctattttatctttgtgttcctgtaataataggtagggctttagacatagtagccagttagtctgttgactggattttctcattagc

SEQ ID NO: 1458 - DNA, 260 bp, Artificial sequence
  Synthetic
gtaagccaattaatggttctgcatgacctagccactgctgggggttttcttctataacgttgtccttgtgaaaacttttgtgaaattaaaaaaaaaggagttacaaattttattctgttattggtttgtttatttttatttatattgttctgtttgtggttttatttattttgttttgcttttccccccctcccctttccctctccttttcccttccttcttctcttccttccttcttccactttctaaattgctcagcg

SEQ ID NO: 1459 - DNA, 244 bp, Artificial sequence
  Synthetic
gtgagcttcacacattcttcccatgtctgttcagaaaagaaacctattcagatataagttaagctaatttagtaatcctagaattgtcctctgagagatttagatggatgggccacttcacagtagcagccaactcacgggagcacctgggcaacgctagtggacttttttgtagtgagtgtgttgatcatagaaaatgtagatataaggaaataaactttgaggatagagaattaacattatt

SEQ ID NO: 1460 - DNA, 219 bp, Artificial sequence
  Synthetic
gtaggccctagtttttctcatgccatcagttccttttcaagctgtgctttgttttcttctttgttctatggtttttgatgtagttgaggtgacggatggtgatgctggctattttaggctgcatggctttctgactactgttttagactccttcccccacacctacccagttcatttttgcttggttttcttttgagcttggcatcttccttaaagggg

SEQ ID NO: 1461 - DNA, 203 bp, Artificial sequence
  Synthetic
gtaggtccgctgtgcctcctccgttggactgtgtgtgctctctagccttggttagtgtgagtgtgttgtgggtttgtttgtttgtttgtttgttttcttaaatcacttttgaaaaaacttgatgcttttttttttttggttaggtaataaaactatgtaacaaattctctaagacatatactaatgtttagaggtttttaaag

SEQ ID NO: 1462 - DNA, 237 bp, Artificial sequence
  Synthetic
gtacgataaacttagacagcatatctgttgtccgagctttaaattaattcttatagttccattgtaggcataagatttgggcttttagattttattttcatagtcatttttggctggtgaaaattttatttcactcatttgcatgatgtgctatgttaaaataactaaatcctttctaattcattaatctatttttaagtgtgatgcctgtgtgctttaataacactaaaataggta

SEQ ID NO: 1463 - DNA, 223 bp, Artificial sequence
  Synthetic
gtaggcccttgggtcggtcgattttctctaactgtgagcggatcatggcatggttttcctttcttcttttcttctaacacgcactttgagctgaatcgttgcatgtttaggaggcattccgtctcacttcctcagcttgcttccttacttcctctgtgtatgtgaatgtctgtgtgcgttttcctgagagccagcgaatgtggggaggaactgaggacagagg

SEQ ID NO: 1464 - DNA, 227 bp, Artificial sequence
  Synthetic
gtgaggctgtttttaaaattctaattcttacaatataggcatcataatattggggaaataattctataagaagggaaaaaatggggttaaggctgggtgtggtggtgtgtgcatgtagtcccagctactcaggaagctgaagtagaggctcacttgagctcaggagttggaggctgaaatgtactgtgattgcaccactgcactccagcctgggcaacataatgaga

SEQ ID NO: 1465 - DNA, 209 bp, Artificial sequence
  Synthetic
gtaaatatcacattactgtttatctactttctcagcactgctgagaggcaaggcaagcctgggaaaaagagaaatgtagtcttcaagggaaatcatgtttcaagtagactgacctcataaatatactataattttttaaggtttgaaaagatgtcgagtcttgtcatttctgttgtgagttcagtacccaatggatgcaagctgagatg

SEQ ID NO: 1466 - DNA, 185 bp, Artificial sequence
  Synthetic
gtaaatgtcctgaacaatttgctttccctattccctgcatgttcccagatgttctcatgctccacttgacctgcacaaacatcttgagcctggcttggctggaataaaaatttgtaagatattttacaccagtgctggattcaattttgtttttgtgttagagcacacaacacggcagaacaggc

SEQ ID NO: 1467 - DNA, 204 bp, Artificial sequence
  Synthetic
gtagggctctcaacttttcagacttgtggttttcctttccctttttccctcttcccttgttcctcctgcctttctcatttcctgggatgctagctttaaaatctctggaatggcatgggggtaggagcagtggaatttctgctgtgctctactcctcaaagtcctgaaggctgcctttaccactgcttgtttcccacaaacctg

SEQ ID NO: 1468 - DNA, 228 bp, Artificial sequence
  Synthetic
gtaagcagagagcaccacaacccctagagatggctcagaggcacagcaggagtcatcggagctgcagtgccagactaggggtgtggaccatgaaagccagtgcagtttttggggaatttaaaatatatatagacacaagctctccgtacccattaagatcattttgttgttacaattgatcataaagaggttagtgtgtcctctttttttaaggaaaaaaatgtattt

SEQ ID NO: 1469 - DNA, 261 bp, Artificial sequence; identical to SEQ ID NO: 1359
  Synthetic

SEQ ID NO: 1470 - DNA, 240 bp, Artificial sequence
  Synthetic
gtagggtacccattccaggtgaggtggagagtgagaatgcctttgtttccctaccctaaccctccccttcaccagcactcagccagggacccactactgcctgcgttcctgcatctccctctgaggaaaaagaagctgcttgttggaataatccacaagtactttggaccccaaatccttaaaattaaagacattagctcacctagatttgaaatattgagcacactaatttctcagcaa

SEQ ID NO: 1471 - DNA, 231 bp, Artificial sequence
  Synthetic
gtgagttttcatatggttttggcatatgaagcttatgactgtcataagccataccaagcctgtggagtatggcatgattttcattacataatccaatgaaaatagacttattttaaatccctaactttgtagttttaatttgtatttcactatcttgaaattaacagctagtacttatccatcacagcagtctcctactgacatgaagcaagttgttgaatgcagtagagc

SEQ ID NO: 1472 - DNA, 222 bp, Artificial sequence
  Synthetic
gtaacggttttcactatttaatgaagcagacccatgcatgtgaagggtggacacctcaggtgacatgctttatagttggcctgagccttgacccagtggttcaacctgagtttggtcttggtaccattcaggtgtttgtgagctgagactgatgagtaggaacaggtgttttatatctcgtcttttgtcaaaagtaaagactcattcctttggtaacccaac

SEQ ID NO: 1473 - DNA, 224 bp, Artificial sequence
  Synthetic
gtaagatccacaagtcagtgcagatgttagcgctggcctaatcggaatgagctgcgtgtctccttatccctaaagtctgcagtagaagcatgctgtcttttgagctacttattacttctccctcttcctgcatggccccattgctttatgtctgattacctcggaaagtcatcttggcagcagctgaaactacacagaccataccttttattagagttcccacc

SEQ ID NO: 1474 - DNA, 255 bp, Artificial sequence
  Synthetic
gtacggtctttcctgcctttcctacattctggaatttcattgatgttctaaagtgccttcctagaaattctaagcaagtctcatttttgttgcatgcatcacttgttgtaaatcatataaatgcactaatatttctaaacatgataattttaatacatttttgtggtcataccttttagataaagtagtggttttttttgtataatagtttaaaaattgtgatacctgttttctgtctgtaatctgaatcttttc

SEQ ID NO: 1475 - DNA, 161 bp, Artificial sequence
  Synthetic
gtacggcattatggaaaagagccccaattatttatataatattctgaacctgtcaatacagtctgtagaaaacatgtagtcatctctgtgtaggagatggagcctgacgtgtgaactcttgccatattttatgcatctttccaatgggaaaggaaccatgc

SEQ ID NO: 1476 - DNA, 160 bp, Artificial sequence
  Synthetic
gtacatacctctccccggcccagaactgctctaaccctctgctcctctctcttgtcctctctctccatgctcccatccttctgtctctgtttctgtctctcaccttgtctctctctgtctttctgtctctggctgtgatctctctggtctctttttctct

SEQ ID NO: 1477 - DNA, 229 bp, Artificial sequence
  Synthetic
gtatgtaacactgaataggttggatgaatgaataaacaaccaattcaatagaatacctcaagtatttatttggtaatagttgccttctcatgatttgtataagtagtaagcaagatgcaaaagaaacaaccctttacttgatgagtcaaaacaattatctgcacatacacatatctagcaatattatttcagcagatgtacagtaatatgtttcatattttaagtgtaa

SEQ ID NO: 1478 - DNA, 231 bp, Artificial sequence
  Synthetic
gtattgaatatttctacccctacacatgtagtgttttcctcttctactgcttctactactgtggggtgtgagtgtgtgttcctaagtgcatgaaattaacatttcctacttcacacacctaacgtttctcattttctccttaatgtttgaattcattgttcaggctttttcataaagctttcttttcgtaaagtggattgagacctcaaagtgttgtcgttgttgttttat

SEQ ID NO: 1479 - DNA, 176 bp, Artificial sequence
  Synthetic
gtaagctcagtgtcctctgtttgcaaagcaaaattttctgcagtgatatactgatatgttactaaaaagtggttgattaattttggagtgacatttatgcatccctgtgttgtgcttgttctaatctgtttctaatatattggtttcaatcccaattaattttattaagagaactt

SEQ ID NO: 1480 - DNA, 216 bp, Artificial sequence
  Synthetic
gtacggcacaaagctaacaattcatgcactttcatggaattgttctccctctccactcttcctcatggtctgtggtgctgggcactgagcctcttcaatttgtctgtcattatgaccaagcgacataacccatttccattctttccctagggtcatcaggcttttcttacagttcatgggtctacctctgtggtaatgggtctttgtgtgtccttt

SEQ ID NO: 1481 - DNA, 329 bp, Artificial sequence
  Synthetic
gtacatggtctttgtgtgtcctttgtatacctctaaacattttacttttttttttttaactttgtaaaaaaaaaaaaaaaaaaaaagggagatgctcttaaacacacacttgtttccactgggtaacagtaagaaatgaggaatttcatttaagccttactgcttcctacaaattgcataatattagattacaccaacatgcaattggccaagtttttaaaaacctgacttgtttttggttgtggaaaacactgttaataaagaagagttatttttgctatgggatggtggctttggagtgttgatttgactgctctgttgactttgaa

SEQ ID NO: 1482 - DNA, 188 bp, Artificial sequence; identical to SEQ ID NO: 1372
  Synthetic

SEQ ID NO: 1483 - DNA, 160 bp, Artificial sequence
  Synthetic
gttcgtccacctctgctaatttctgcaccacctttttcactttttaatcctctgctttcaaattttgcttaatcaaataaactctttaaagttaatttctttgggggaggtgtgggaaagtgggaaagtgattgagaaatcaacattttgagttatttga

SEQ ID NO: 1484 - DNA, 238 bp, Artificial sequence
  Synthetic
gtacgaagtttaccaatctattaatccttccgagggcctccagaatcacactccccccaccacggaatgtgcattgtggttgttgagtgctgagaatgctgagatgacgtggacatccctctgccacctgcctgcccactctgccacctggagcccatccctcctgagatcctaatgcattcagcgcagcttgggtttatatatgaggaggcagtattgatctgagaaggactacaaa

SEQ ID NO: 1485 - DNA, 199 bp, Artificial sequence
  Synthetic
gtagggaaatctttactttttgctaattagcagatttttttttttttgaactgtaagtgccattaagagtgggagagggccaggcacagtggttcatgcctgtaatcccagcactttgggaggttgtggcacgtggattgcttgagatcaagattttgagaccagcctgggcaacatggcaaaaccccatctctacaaa

SEQ ID NO: 1486 - DNA, 182 bp, Artificial sequence
  Synthetic
gtactgcttcattcaggggttatttgctaaatatgctgtatactaagtatgctatgtgtagaaaaagaatcatgacagaatttgtgctcttaattgtagcaaacattctaataggtagcaaatttctaagacattggcttctaaaaggaatacaatttctagcagtggagagactactgaca

SEQ ID NO: 1487 - DNA, 190 bp, Artificial sequence
  Synthetic
gtaagccctcagcagggacctcatctctaactgcgtggaaacctgatccttaatgtcactgaggagtatgtggttctccagaggtgggcctcacaggagcttctgcggttgtacctccaccgccccttgccacagtctctctggctttctgtggttatatctgagtgcattccttaaaagataaaagagg

SEQ ID NO: 1488 - DNA, 255 bp, Artificial sequence
  Synthetic
gtaagcccgagacctctccaccgtctttctgtcttgattccggctgccttctcttcttgtaattgtgcttaattcctgatttccctccatgttgaagagtgactgatgaggcacacaggcgtggacctcactgccccagttcccccatgaatgcccagacttcccaccaccccggctttttctctacccagtcatttagctatttcacattacctgagaggccaaggcatggctggctggcacccgggagacttc

SEQ ID NO: 1489 - DNA, 172 bp, Artificial sequence
  Synthetic
gtaggtcagaagtagctgagactccattcctgagatcttcacttaacaactcctgcagcttgtgcagagccttactagaaatactgaaggcagaagtccctggaaaatagggcccataactaattagtaatttgtttttgagtaatttgttaccgttatttgagcacattct

SEQ ID NO: 1490 - DNA, 334 bp, Artificial sequence
  Synthetic
gtaagcccgggctcaatggttcacacctgtcatcccagtttgagactgaggagggaggatcccttgaaggcgagagatggagaccagcctgggcaacattgctgtagagatgacatcccatctctacaaaaataaaattaacaacctggtatggtggcatagactgttcccagttacttaggaggctcagcggggaggactgtttatgcaaataggaagctgcaatgagccctgatgatcctgctgctgcactccagcctgggcaacacagcaaaaccatctctacgaaaaaaaaagttcccactgactggcaaggaaagccaggaaggggggc

SEQ ID NO: 1491 - DNA, 255 bp, Artificial sequence
  Synthetic
gtatgcccacggcccttcccctgatgcatggacgcccagcctcctcctcccccgctccttcctctgcgcagtgtgctgcagccaggccgcatcttgctgtggtttggaaccttcttgtgtcctgttcaactcagaaaccccacagattcttgcttttctgcaggcttggcctctaggttggctgggttgcagagcagtcttgcttctaggttgtcatgagctgcgtggcttccagagctctggggataggaaaca

SEQ ID NO: 1492 - DNA, 225 bp, Artificial sequence; identical to SEQ ID NO: 1382
  Synthetic

SEQ ID NO: 1493 - DNA, 218 bp, Artificial sequence
  Synthetic
gttaggctgaattgtgctgtgtgcatgtgtgtttgaaagctcaaacagcttgtcttcttacagcatcgagttgtttgctttattgttagacacaatattagcagtgtatcctttccgtattccctaccatcgaacccattaagatctaaaatccttgtcaagtatctggctttaaaagttgggagatggtagtttaaaaaaaaaaaaagctcttgcaa

SEQ ID NO: 1494 - DNA, 223 bp, Artificial sequence
  Synthetic
gtaagtaccgcagcccagcccgagggcagccgctgacactgccttcgcagcggtccccggatggcctgctcctgcctggcccagctgggcccactctgctctgaggatgggccaggcctatgcgcctctctctccactctctctcttttgggcctaggtctccttgcctctctccagatgggagtgcgtgcctgtctgtcaggcctgggccaaggggagaagc

SEQ ID NO: 1495 - DNA, 198 bp, Artificial sequence
  Synthetic
gtaagtaccgcagcccagcccgagggcagccgctgacactgccttcgcagcggtccccggatggcctgctcctgcctggcccagctgggcccactctgctctgaggatgggccaggcctatgcgcctctctctccactctctctcttttgggcctaggtctccttgcctctctccagatgggagtgcgtgcctgtctg

SEQ ID NO: 1496 - DNA, 250 bp, Artificial sequence
  Synthetic
gtgagtaccatcttatttaggaggaatcatggccactgtacactgaattctgataacctgtaatgcgaattcacaatcacttctcttagtcatttctttctatgtgataaaataccctccttaactgctgatatcgaagagtcgtctcagtctgtggagggtttcattataaaccagtggagatttgccagacatccttgggaggtgacttcttactctattagctaggaaaattggcacaaagcttcta

SEQ ID NO: 1497 - DNA, 167 bp, Artificial sequence
  Synthetic
gtacagatttgttttcgtccttggtgtttctgaatgtgcccatgtgcctttccttaccctttttttgggcgtgagtgtgtggttgcatccagctggctttgccttcaacatctcaaaggtgtcttcacttattgtcctttgtgtctgcttggcatatctgtcacatg

SEQ ID NO: 1498 - DNA, 165 bp, Artificial sequence
  Synthetic
gtgaggcggctacctcatctaactggactcactctgtcctgtgactcccattctttcttctctcttaactctgccttcagtttcgcagccacctcctctctctgatcagtcgttgtgttggtagtgaagggtgttcttgtgcagcctttctacctgcttctctgt

SEQ ID NO: 1499 - DNA, 253 bp, Artificial sequence
  Synthetic
gtaagccccgtccatgccctgttctcgctggctctgcctccctgcctgcatgtctgacctgtgtgtgcgggcattgggagggggctctgtggatgtgagggtctgtgcgtggggtctggttgttcatttactcacagaagcacagcctatggagccagactcgggggttcaaatggcagctctgccaagtgaccttgagcaagtcactcaaggtctctgggcctggttttcctcttctgtaaaatgggtatag

SEQ ID NO: 1500 - DNA, 334 bp, Artificial sequence
  Synthetic
gtaagaggcgcggggcggggcgtgagcgcatgaacaggctgtgcacgacgcatggatgcccctcctccgagccctgcccctgccttcaccagaacatgccatcatccccatgggggggcgctgcgccaagcttggctctggactgttccattatggcttggcggtggggagggtagaggggatgcgatgtggaagcccagactgttgcatagtcagccttatgcatggaccatttcatcatcgtgggttgtgggggctctaaggggcttcaattctgtagctcaggagagactgagcagccggtgtccctatagtggagggggcgggggctaca

SEQ ID NO: 1501 - DNA, 221 bp, Artificial sequence
  Synthetic
gtaagcacacgtaggtgctggctgaggagcaaagagttcctttccctgcttgtccgagacactgctaggcggaatgacctgcttttcctcctctactgtccttgtgatcctttcttctttctttcctcttccttagttaccccttgtccccctctgcatgcttgaattttggcaacttcgaatttttatatattagaggaaaaaaacaccacttcactctg

SEQ ID NO: 1502 - DNA, 212 bp, Artificial sequence
  Synthetic
gtgagtgcagtgagtgctgcggaggggcgcagaggcccgcgccctggctggccctgtgcatgcgccttgcgccctgctcccaggtgccactaacccgtaatctggctctgtgtgcagtgctgcccggcagggctgtcgtgtgcgtgttgggtgggaaggcggaggcggcgcggggcgggctggcctctgagcatctggctgcatttagcacg

SEQ ID NO: 1503 - DNA, 195 bp, Artificial sequence
  Synthetic
gttcgcaatagattttttaccttccctgttttataatgaatttgattctttgtgaaactgtcctaattttattttgcttaagtttataatattgtatcacgtagtaaggacaagagttatattttactgtgacacctcatttatccagtatctttagtgaaagaatattctgtgtgatgttctatgtaccctgag

SEQ ID NO: 1504 - DNA, 161 bp, Artificial sequence
  Synthetic
gtgcggatttctaatctttgcacctccatcactggcaggtggcttccaggccacaacacaagaatcttttgtgacagcagtaatagttggtttgccaggagcacctggcttttctattaaacaaaaaaaagatttgagtcatgagatgaaacaggcagctt

SEQ ID NO: 1505 - DNA, 233 bp, Artificial sequence
  Synthetic
gtacgaattcacagacgtgtggtctcacgatattaacccaacttaacttaaaaaaaaaaacaacatcctaaagaagaaattcaaagtgcatgcttactgtaaataggctccagggtgtagaagaactcacaatggcaggagtgccggcatgggtgtacactcaccattttcccaaatgcattgtttgaaccaagattgaaaatgtaactgcccagtagaaaaggttactaaca

SEQ ID NO: 1506 - DNA, 212 bp, Artificial sequence
  Synthetic
gttcggattccctttgctgctctctgcatctctgcttccagccccagccagcatgagggcctagggtggcatggtcagggaggggtgaaccccagggtacctgctctgctttcttctcctttttggggggcagaaagcactgctctccctcagccacagggccctgctcgtagatgtgggattctgtctgcctctgagcccacactcctggc

SEQ ID NO: 1507 - DNA, 198 bp, Artificial sequence
  Synthetic
gtaggccccccgggcctcgccctgctacaacccaccaatcagttggctcaatcagttccctcactcgccaccatgggcatcccaactgcccccctctgtggcttctgtgtaccagaagttgctcccctgccaaaatgtccagtgatttcctaattgctttcaattaggggaaaagtgaggtgggaagggatgggcttt

SEQ ID NO: 1508 - DNA, 172 bp, Artificial sequence
  Synthetic
gtaggggagctgctccagggctgagcccaacagcttctgctggcctgtgccacccctggatgcctgcactcttcagaacatgacttacaatgcacacatccctccacctatgtaacagggcacagatctcatgctgagccacagtaggcaggcctgtagctacatcagccag

SEQ ID NO: 1509 - DNA, 290 bp, Artificial sequence
  Synthetic
gtacccaatgcactctgcatggatggggaggatcttatcctcttttgtttattctttactaattcttttgttcttggagtgaatgaatgtgctgggcctctaaaaatgtgcttattttgtggggaagcatattttgacatttttctaatttgcggagtatattttgcgtgtctgcttttggcatttagaaagtgcttttaataatttcattaaaatttctgaaatttgagaaaatagttgaaattgtaaattattttttcctttgttttaaaatcatgtaggatgtatgc

SEQ ID NO: 1510 - DNA, 228 bp, Artificial sequence
  Synthetic
gtaaaaaaaccagacagcttcttaaggattttgggtcatctcccagttgctctcttcttaaactatcagcacaagtttgtcatctatcacctagttgtggtttcttttgttgctgcggttgttttttagtggcattgctttattcatcaccttcatttcatctaaacttcttttacctaagtgacaaaggctattcttagtgtatagttggtgaaaactccaaataat

SEQ ID NO: 1511 - DNA, 223 bp, Artificial sequence
  Synthetic
gtaacggagtagtcctgtggtgtggatcgctggcatctcattgcttctgcctcagtaatgactgtcttaattgtgatgatagcagctcactaactctgcgtttgtggtgtgatgagcagctagtgtagagtagctgaatgctaataattatggttcctgaattaattaaaaagcggatgtttaacttcacccattatttcctcctgcttttcccctttttcaa

SEQ ID NO: 1512 - DNA, 199 bp, Artificial sequence
  Synthetic
gtaagcattactctttcttgcctgctcgtccactacattctgctcctcaaccccttatttattttccatctctgcctctcatctgcctcagtttggtttcctcctgttcttttctctctctttctttgtattcttttgttttgctgaccccttttgcttactctgtagtctttgccctttttccattcttttgtttgct

SEQ ID NO: 1513 - DNA, 144 bp, Artificial sequence
  Synthetic
gtacgcaggaactggaatttagagtttgggaatgttattttgacaacgaaattacttatgtgaaatcttttcttctactttcccaaaggcatttttaaaaaggcaagttgcatacttctctgattttttttttcctcttaagaa

SEQ ID NO: 1514 - DNA, 256 bp, Artificial sequence
  Synthetic
gtaggtatttgagtaatgaattatttcgccttccttaaaaaaagacgcagcttcacgcatgtgactataccagcttcatttaatgctgtgtggattgatcattataattcatgacattctatttagtcttgtggtgtgcttttatgttttccatcttcccttagctaaatgctatatggctttaaaaaatacatatgtatttataatttataatggcagattatattaaagtaacttattttcccagaaatgtctg

SEQ ID NO: 1515 - DNA, 150 bp, Artificial sequence
  Synthetic
gtaaggaatagtcttaatattaatttttcaagttacaagggcttaagattataaaaatttgcttaagaatatatttctatatgatttgggtatatattctcttatgtagggcacaaatcccaatttaaatgaataaaaaattgcctttga

SEQ ID NO: 1516 - DNA, 225 bp, Artificial sequence
  Synthetic
gtaggttgagtggacctgtggacaccatcaggtcacaagcatgaaaaaaatgtctatgtctgctttctaaatatattatacttacatgtacacatgtgtgcatatacattcaaaatttgcattgcataaattgtttattcaactaataagactactactattaagaaaatgcattcttccttcacagtgtgttagtaacttgtctaattgaactaatgttgtgtc

SEQ ID NO: 1517 - DNA, 206 bp, Artificial sequence
  Synthetic
gtacgttagcattagcctggaattcaggtccctcactgttttactctctatcttccttcctttcatcctgccatctttcctagcctaaatacaaactacagtgtttattctctaatccagatttggtaggttgaagctatttcttacacagagctatatttcatgtaactgattctaaccaggttttacctgtagcaaacatgtat

SEQ ID NO: 1518 - DNA, 228 bp, Artificial sequence
  Synthetic
gtaaagaatgaaattgggctttggttagaagctcattgatgaggactacagtagaatttaacctagagattgaaaaaacctgtccttttgattcttcttgagcatttacacagtatgaaaaatgagtcagtaggagacagagacttccataggaaaacctgacgttgtgcctggaagaactcttcttttcagcaaacactaggcttgtaaaatgtataagtaggaact

SEQ ID NO: 1519 - DNA, 249 bp, Artificial sequence
  Synthetic
gttagtcagtattgcctgtcctgcatgttgtgatcaattgctgaaataatgcagtcttgaagtaaaacattaactaatagtttgcaaagtaggagtgtttggcctgtgtgaacctaaaggtcagagtgtctattctgtctatagtggaccagaggtatacttggagtcctgccattttatgttgtagtcagtatcctcaccttcatctcatgaatgctcctgatcaagaaagagtgagaaaatgaatgt

SEQ ID NO: 1520 - DNA, 167 bp, Artificial sequence
  Synthetic
gtgcggctggtaaattactgattatctacaccctttcccttttctgtccttccttgactttttccttccacctttcttaaatttttgttatcctttccacaaagattccctccttatgttcatcaaattcacttgtgtctttgtcatagattgtttaaaagggattg

SEQ ID NO: 1521 - DNA, 231 bp, Artificial sequence
  Synthetic
gtacgaacctaccacctcctcaccatgctgtcttcactctttctgttttcattatttcaagaaaatccagatccaaaccaactcactctccttgcttcaagttttttagcattggcttgtctgttggttctgtctgtgaaacccagtgtgagaagtccagtcactttttatcagcctaaaacaggttagacaattaagccatttgtttgtgataaactcagatttgtctgt

SEQ ID NO: 1522 - DNA, 260 bp, Artificial sequence
  Synthetic
gtaggttggccagtcccctttctgttgtacctgcaacagataagggctctgctgggtgtattcatttttttgctgtagcttgtacagagtgtgtgggtgttgagctaacagttgtggctcagtattaaccaaaatgttcttgctttaaaggggaaaatgtccttctatggtttgtttgtttgtttctttcccttaaagctatgtttgacttttgtatatgatgaatactataatcacagaaaacaaaaggattatatatt

SEQ ID NO: 1523 - DNA, 223 bp, Artificial sequence
  Synthetic
gtacttgtgacttaaaacaaattgatggctgctggccccccattcttctccttcttctgcaatatgatttctcttttttgtcattgtgcccatgacatgtccctttctatgatttaaattctgtataacctatctttagtggaccatttctgacccttgtggtatgtgacttttatttttgagtgatgtttttatatctttccccttaaagtgctgtgacctt

SEQ ID NO: 1524 - DNA, 183 bp, Artificial sequence
  Synthetic
gttggtgttagcatggggtgatgctttgccaactaacaccataaaaatttttccaattttaagaaaagaaggggagaatccctacatctaccctaaagaggatagaaaactgcctactctcctgtattataatactttggtcaagtaatggatctattgaagtatcatccctgaagtatcctc

SEQ ID NO: 1525 - DNA, 205 bp, Artificial sequence
  Synthetic
gtgcgcagaaagaatcaacatcatcttgctttaacaagactatacatctcatcaaatattcaaaaaaattaattcgttatctaaaaataggaaagaaaattctaaccattttctaccacacttccttttgggcctaatttatctagaactatggacatacttcttgcaaataaaaatgaatgacatcttgaaagagaaactaatg

SEQ ID NO: 1526 - DNA, 194 bp, Artificial sequence
  Synthetic
gtgagtactctgtcccatgccggccggcacaagagctccagctccaaggccctggccgcgcgccctgcacgccccgcacgcccagccctgctcgctcccgccccggctcgcgctccactcggggccgcctcggcaaggctggcagctccagcctccacggtgaccgcccgcttcgagccctgtggcctgcgccg

SEQ ID NO: 1527 - DNA, 181 bp, Artificial sequence
  Synthetic
gtacgtatccggctctgttctggccacagtgtacctaacagtgatagcatggtttcttttcttttcaaaagtccagctcttgctgttttatttttactttcctgaaggcactatcagatttctcttttaaagacaagcatctaaaacatgttctaattgttgtggggtccaatccgccagt

SEQ ID NO: 1528 - DNA, 244 bp, Artificial sequence; identical to SEQ ID NO: 1418
  Synthetic

SEQ ID NO: 1529 - DNA, 237 bp, Artificial sequence; identical to SEQ ID NO: 1419
  Synthetic

SEQ ID NO: 1530 - DNA, 241 bp, Artificial sequence
  Synthetic
gtaaattggttgtaaaatatacctttggaaatctttgaataattgaatacaattaatgaatggacattaacaataatgcatgtgaacttcaaagatgatgatatcccaaatctgatcaggatcattttttttatttggcttcttaattgaatcagattttacaactgattgaatttacgtgattacacaagtagcttggttataaaggctgtctgttttatatagacataaagaaaacaac

SEQ ID NO: 1531 - DNA, 244 bp, Artificial sequence
  Synthetic
gtgaggttttatagcttctaaacatgtcagcagggtggctttttaaattgctgcgctaaccctttcattgtgcattaaaggaaaagtttattaaagataagtggaaaaaaatgtagtctagaggaacttaattatattgtcatttgcctgttataaaatctagcaggcaaatgaaataaaataattgctataaaagatttataaactttgtgaggaaagaagaaaagatctcatcgttaagttt

SEQ ID NO: 1532 - DNA, 252 bp, Artificial sequence
  Synthetic
gtatgtacccctgatatttctcgaggaaatagaaaacccgggtattgtctctaaaatctgcatcaatatattccacggcactgtgtctatctatccctgtgccttttttgaaggctgaagttgaggctcgttgtgcattctttttcgttagattccatgatttccttgtttgttgctaaaagtaactttttagatagtcgtatccgtttgccatcagctattgaaatcactcctgactcgttcctgtcacac

SEQ ID NO: 1533 - DNA, 160 bp, Artificial sequence
  Synthetic
gtaggcctcatcagaactgtattctgttgcccttcactgctgctcggccttactgcgctaacctcattcatggtgcttataaaatcgatacattctgatagccgtttggtgccccaacgggccagcttccttcctgaatgaggcattaggtgcaaatctt

SEQ ID NO: 1534 - DNA, 185 bp, Artificial sequence
  Synthetic
gtaccccccatggtgcccaggactccgaggcccatgagtctgacacgccctccaaaaggggcctaatatcactccacattctccatttcctctatcttaaaagtttaggagagctttacagatatttgtatgtctttttattactcccagaactgctatgaggaaaaaaacccatgatagctact

SEQ ID NO: 1535 - DNA, 199 bp, Artificial sequence; identical to SEQ ID NO: 1425
  Synthetic

SEQ ID NO: 1536 - DNA, 195 bp, Artificial sequence
  Synthetic
gtgcgcatgtatttaatataatttatggaaccataagatttattagatcaatgatttccaaactgcaagtcaaggtccaatagtgaattgagaaataaatttagtgaatagcaatcagtcttttttgtagaattttaaagatagtaaatattagacttgatttcaagtaatgtataggttttgttgacatttgtt

SEQ ID NO: 1537 - DNA, 239 bp, Artificial sequence
  Synthetic
gtattcaacctctctctttgcctctcccctctttccttttctctttcctacttttccattcttgcttcagtcatttgttttaaaataacatgcttcatccatcgcgtatggcttaactcatatccagctgagctggtgcttccaaatttaaattctgaaaatttgatgactttggttgtgttacacatgcaggtgttataagtgatcaaacacatgctaacacgttgctcaccgggttc

SEQ ID NO: 1538 - DNA, 261 bp, Artificial sequence
  Synthetic
gtacttattgttttctatgtatgtcatatgttctgaaatataatttcaatcaattacacatatgattcttgatgcaaagagatggtttcaaattacctaaaattgtaaaataatatccagattctattaaaaacaaacctcacaatatatgaattttctaatctagatgtaatgtatttgctctttaattttcactgcatgccttattttccaatcatttttaatgaatacttaaaaatatattaaaattctgagtgatct

SEQ ID NO: 1539 - DNA, 225 bp, Artificial sequence
  Synthetic
gtaccacgcctcccaccaggcgatgtcctcctcctcctccccttccttcatttcttctctctactcctctgcagccagggcggggacatggtctgggggcctcttggggagcaggcaagagttaggctgggcagatggaaccccacttgggcacagcactccttctcttgcagctgacgcacctctcctgccacgctggtttcatgattaactaccttgttcttt

SEQ ID NO: 1540 - DNA, 188 bp, Artificial sequence
  Synthetic
gtgagagtgtctcgaccagcgtcccgcccgctcccgcccgtccctcctgccagcatgcagccccctgctgcacgcagccgctggccgggctccagagccgccccagaggccgccaggcccccgggagcccctgctcccgtgtggtcacatcccagcagagcccaccacaagggcagggaggcagcccc

SEQ ID NO: 1541 - DNA, 234 bp, Artificial sequence
  Synthetic
gtacggtgaacctggggcttcccgctcccgctgtgaggctgcactatgcatggctctggggtcagagctgcacagaggtgatgtttttgtgccagactccaaggaatggaagtttggcttggggccctcctgaaggtgcatgcgaggctgacatgagattttggtttggtttcttgattccctggttggttcagataagaatgcttcttaggagaatttgctgtgtggctctaa

SEQ ID NO: 1542 - DNA, 195 bp, Artificial sequence
  Synthetic
gtaaatagtgggcagtgctagcaaaattcccggggcacttctgtccattatctcaatacctggggttgacatttcctgtctcagatcaggagtcctgactaccctgcctctgaccactcgaactgagtgctgcttagctgtatcgtagacaccgcctgtttgtgaacagacaccctgcttcttgatgataacaca

SEQ ID NO: 1543 - DNA, 246 bp, Artificial sequence
  Synthetic
gtaggtgtgaatgaaggtagccttaacagtgctttcaaatttgctaaatccaagttgggattaagcttctgttcttaaagcttataattaaagctgcctttcctgacatcaagcttccagagcatgaaatgagatgagcatcatttcttaataagctggagcaaaaatgttattaatgatggtagagggtgtgtattggctaaccaaagattgcaaagtcaattatggaatcaagttaataatcag

SEQ ID NO: 1544 - DNA, 172 bp, Artificial sequence
  Synthetic
gtacgaagctgggaccacaggcggtgcccaggtttttttttttttttttttttttttcgttggtagagacagggtctcactgttgccaggactgctctgaaactcctggtttcaagtgatccccttgcctcctcccacttaggccttccaaatgctgggattacaaggcatg

SEQ ID NO: 1545 - DNA, 225 bp, Artificial sequence
  Synthetic
gtatgtgactaaactgtgctaagagcttaatgcttactctctgtcccaccatagtctattggttagacttaaaattggtagttgaataatttcagaaaggctctccatccgccccttcagttttaatgtatatgttttctctggacctgttgcgtgatctggcagggtgctgagggttggatgtgaggaaggagaggccatgtttctttttctgacttttgactg

SEQ ID NO: 1546 - DNA, 258 bp, Artificial sequence
  Synthetic
gtacttatctatgtctgtctagttctaggacttagtaaaatctagcttggctgattaaaaaaactttaattttatcttttaaccaataagcagaagccattgcggcagccttcataagctaaaatactgctctgtgtagactgtattggtagcttatgttttgaatttacattgtagtgtgctgcatattatttggattatattgtatatggtaacaaaataagctctgctttaaagtctttcttgaatttttttccc

SEQ ID NO: 1547 - DNA, 191 bp, Artificial sequence; identical to SEQ ID NO: 1437
  Synthetic

SEQ ID NO: 1548 - DNA, 227 bp, Artificial sequence
  Synthetic
gtacccactaaatttaccatttttgtggcatggataaaatggagtgctatgcaaatactgttgcacgtgagatgatttctaagtccttgcttgatccgtgaagatcaaatagttaaatactgggcatttgggctttaacccttagcggttgatgcatgatggtgttgattagtgctttgagatgtgtcaacctttcttttttatactaacagcatcattttgaaatt

SEQ ID NO: 1549 - DNA, 11 bp, Artificial sequence
  Synthetic
cagagaatggt

SEQ ID NO: 1550 - DNA, 11 bp, Artificial sequence
  Synthetic
tgggagatggt

SEQ ID NO: 1551 - DNA, 11 bp, Artificial sequence
  Synthetic
gattaaatggt

SEQ ID NO: 1552 - DNA, 11 bp, Artificial sequence
  Synthetic
tacctcatggt

SEQ ID NO: 1553 - DNA, 11 bp, Artificial sequence
  Synthetic
attcttatggt

SEQ ID NO: 1554 - DNA, 11 bp, Artificial sequence
  Synthetic
gagggtatggt

SEQ ID NO: 1555 - DNA, 11 bp, Artificial sequence
  Synthetic
gctggaatggt

SEQ ID NO: 1556 - DNA, 11 bp, Artificial sequence
  Synthetic
ccgatcatggt

SEQ ID NO: 1557 - DNA, 11 bp, Artificial sequence
  Synthetic
caaacaatggt

SEQ ID NO: 1558 - DNA, 11 bp, Artificial sequence
  Synthetic
atatacatggt

SEQ ID NO: 1559 - DNA, 11 bp, Artificial sequence
  Synthetic
tgaattatggt

SEQ ID NO: 1560 - DNA, 11 bp, Artificial sequence
  Synthetic
aaactcatggt

SEQ ID NO: 1561 - DNA, 11 bp, Artificial sequence
  Synthetic
tctggaatggt

SEQ ID NO: 1562 - DNA, 11 bp, Artificial sequence
  Synthetic
ttcgtcatggt

SEQ ID NO: 1563 - DNA, 11 bp, Artificial sequence
  Synthetic
caatccatggt

SEQ ID NO: 1564 - DNA, 11 bp, Artificial sequence
  Synthetic
gcctgcatggt

SEQ ID NO: 1565 - DNA, 11 bp, Artificial sequence
  Synthetic
gccgagatggt

SEQ ID NO: 1566 - DNA, 11 bp, Artificial sequence
  Synthetic
tgttatatggt

SEQ ID NO: 1567 - DNA, 11 bp, Artificial sequence
  Synthetic
agcagtatggt

SEQ ID NO: 1568 - DNA, 11 bp, Artificial sequence
  Synthetic
ttggccatggt

SEQ ID NO: 1569 - DNA, 11 bp, Artificial sequence
  Synthetic
agacaaatggt

SEQ ID NO: 1570 - DNA, 11 bp, Artificial sequence
  Synthetic
gtgccaatggt

SEQ ID NO: 1571 - DNA, 11 bp, Artificial sequence
  Synthetic
gatagaatggt

SEQ ID NO: 1572 - DNA, 11 bp, Artificial sequence
  Synthetic
cttccgatggt

SEQ ID NO: 1573 - DNA, 11 bp, Artificial sequence
  Synthetic
tccctaatggt

SEQ ID NO: 1574 - DNA, 11 bp, Artificial sequence
  Synthetic
ctgattatggt

SEQ ID NO: 1575 - DNA, 11 bp, Artificial sequence
  Synthetic
cagttcatggt

SEQ ID NO: 1576 - DNA, 11 bp, Artificial sequence
  Synthetic
gccagaatggt

SEQ ID NO: 1577 - DNA, 11 bp, Artificial sequence
  Synthetic
cccagaatggt

SEQ ID NO: 1578 - DNA, 11 bp, Artificial sequence
  Synthetic
ctcctgatggt

SEQ ID NO: 1579 - DNA, 11 bp, Artificial sequence
  Synthetic
cagcttatggt

SEQ ID NO: 1580 - DNA, 11 bp, Artificial sequence
  Synthetic
ccgtatatggt

SEQ ID NO: 1581 - DNA, 11 bp, Artificial sequence
  Synthetic
tcatctatggt

SEQ ID NO: 1582 - DNA, 11 bp, Artificial sequence
  Synthetic
gacactatggt

SEQ ID NO: 1583 - DNA, 11 bp, Artificial sequence
  Synthetic
cctgtaatggt

SEQ ID NO: 1584 - DNA, 11 bp, Artificial sequence
  Synthetic
ggtacaatggt

SEQ ID NO: 1585 - DNA, 11 bp, Artificial sequence
  Synthetic
gcaggaatggt

SEQ ID NO: 1586 - DNA, 11 bp, Artificial sequence
  Synthetic
gctactatggt

SEQ ID NO: 1587 - DNA, 11 bp, Artificial sequence
  Synthetic
gctagcatggt

SEQ ID NO: 1588 - DNA, 11 bp, Artificial sequence
  Synthetic
catcatatggt

SEQ ID NO: 1589 - DNA, 11 bp, Artificial sequence
  Synthetic
ttaaatatggt

SEQ ID NO: 1590 - DNA, 11 bp, Artificial sequence
  Synthetic
ttgaacatggt

SEQ ID NO: 1591 - DNA, 11 bp, Artificial sequence
  Synthetic
acctctatggt

SEQ ID NO: 1592 - DNA, 11 bp, Artificial sequence
  Synthetic
cgtgccatggt

SEQ ID NO: 1593 - DNA, 11 bp, Artificial sequence
  Synthetic
agctttatggt

SEQ ID NO: 1594 - DNA, 11 bp, Artificial sequence
  Synthetic
tttcagatggt

SEQ ID NO: 1595 - DNA, 11 bp, Artificial sequence
  Synthetic
aatttgatggt

SEQ ID NO: 1596 - DNA, 11 bp, Artificial sequence
  Synthetic
ttttatatggt

SEQ ID NO: 1597 - DNA, 11 bp, Artificial sequence
  Synthetic
tcccaaatggt

SEQ ID NO: 1598 - DNA, 11 bp, Artificial sequence
  Synthetic
ggttgcatggt

SEQ ID NO: 1599 - DNA, 11 bp, Artificial sequence
  Synthetic
ttggagatggt

SEQ ID NO: 1600 - DNA, 11 bp, Artificial sequence
  Synthetic
aaggtcatggt

SEQ ID NO: 1601 - DNA, 11 bp, Artificial sequence
  Synthetic
gaggagatggt

SEQ ID NO: 1602 - DNA, 11 bp, Artificial sequence
  Synthetic
caaggaatggt

SEQ ID NO: 1603 - DNA, 11 bp, Artificial sequence
  Synthetic
tcctccatggt

SEQ ID NO: 1604 - DNA, 11 bp, Artificial sequence
  Synthetic
cgctggatggt

SEQ ID NO: 1605 - DNA, 11 bp, Artificial sequence
  Synthetic
cgctggatggt

SEQ ID NO: 1606 - DNA, 11 bp, Artificial sequence
  Synthetic
tcctctatggt

SEQ ID NO: 1607 - DNA, 11 bp, Artificial sequence
  Synthetic
tgggttatggt

SEQ ID NO: 1608 - DNA, 11 bp, Artificial sequence
  Synthetic
ccgctgatggt

SEQ ID NO: 1609 - DNA, 11 bp, Artificial sequence
  Synthetic
ccaagaatggt

SEQ ID NO: 1610 - DNA, 11 bp, Artificial sequence
  Synthetic
tgggagatggt

SEQ ID NO: 1611 - DNA, 11 bp, Artificial sequence
  Synthetic
ctccacatggt

SEQ ID NO: 1612 - DNA, 11 bp, Artificial sequence
  Synthetic
gaagaaatggt

SEQ ID NO: 1613 - DNA, 11 bp, Artificial sequence
  Synthetic
cgatttatggt

SEQ ID NO: 1614 - DNA, 11 bp, Artificial sequence
  Synthetic
cttctcatggt

SEQ ID NO: 1615 - DNA, 11 bp, Artificial sequence
  Synthetic
gagattatggt

SEQ ID NO: 1616 - DNA, 11 bp, Artificial sequence
  Synthetic
gacccaatggt

SEQ ID NO: 1617 - DNA, 11 bp, Artificial sequence
  Synthetic
ccattaatggt

SEQ ID NO: 1618 - DNA, 11 bp, Artificial sequence
  Synthetic
agaagaatggt

SEQ ID NO: 1619 - DNA, 11 bp, Artificial sequence
  Synthetic
gagaaaatggt

SEQ ID NO: 1620 - DNA, 11 bp, Artificial sequence
  Synthetic
aaattgatggt

SEQ ID NO: 1621 - DNA, 11 bp, Artificial sequence
  Synthetic
tcctcgatggt

SEQ ID NO: 1622 - DNA, 11 bp, Artificial sequence
  Synthetic
gtctctatggt

SEQ ID NO: 1623 - DNA, 11 bp, Artificial sequence
  Synthetic
gagcaaatggt

SEQ ID NO: 1624 - DNA, 11 bp, Artificial sequence
  Synthetic
gtatcaatggt

SEQ ID NO: 1625 - DNA, 11 bp, Artificial sequence
  Synthetic
ccttctatggt

SEQ ID NO: 1626 - DNA, 11 bp, Artificial sequence
  Synthetic
gacagcatggt

SEQ ID NO: 1627 - DNA, 11 bp, Artificial sequence
  Synthetic
acgggaatggt

SEQ ID NO: 1628 - DNA, 11 bp, Artificial sequence
  Synthetic
aaaattatggt

SEQ ID NO: 1629 - DNA, 11 bp, Artificial sequence
  Synthetic
aagtggatggt

SEQ ID NO: 1630 - DNA, 11 bp, Artificial sequence
  Synthetic
tgtgctatggt

SEQ ID NO: 1631 - DNA, 11 bp, Artificial sequence
  Synthetic
taaccaatggt

SEQ ID NO: 1632 - DNA, 11 bp, Artificial sequence
  Synthetic
ctgattatggt

SEQ ID NO: 1633 - DNA, 11 bp, Artificial sequence
  Synthetic
attcctatggt

SEQ ID NO: 1634 - DNA, 11 bp, Artificial sequence
  Synthetic
aattaaatggt

SEQ ID NO: 1635 - DNA, 11 bp, Artificial sequence
  Synthetic
tgaaacatggt

SEQ ID NO: 1636 - DNA, 11 bp, Artificial sequence
  Synthetic
cccgagatggt

SEQ ID NO: 1637 - DNA, 11 bp, Artificial sequence
  Synthetic
acctcaatggt

SEQ ID NO: 1638 - DNA, 11 bp, Artificial sequence
  Synthetic
tgattaatggt

SEQ ID NO: 1639 - DNA, 11 bp, Artificial sequence
  Synthetic
gacagcatggt

SEQ ID NO: 1640 - DNA, 11 bp, Artificial sequence
  Synthetic
ttttggatggt

SEQ ID NO: 1641 - DNA, 11 bp, Artificial sequence
  Synthetic
gctccaatggt

SEQ ID NO: 1642 - DNA, 11 bp, Artificial sequence
  Synthetic
ttccttatggt

SEQ ID NO: 1643 - DNA, 11 bp, Artificial sequence
  Synthetic
aggagcatggt

SEQ ID NO: 1644 - DNA, 11 bp, Artificial sequence
  Synthetic
ccttggatggt

SEQ ID NO: 1645 - DNA, 11 bp, Artificial sequence
  Synthetic
acatttatggt

SEQ ID NO: 1646 - DNA, 11 bp, Artificial sequence
  Synthetic
acagtcatggt

SEQ ID NO: 1647 - DNA, 11 bp, Artificial sequence
  Synthetic
ctactaatggt

SEQ ID NO: 1648 - DNA, 11 bp, Artificial sequence
  Synthetic
aacttcatggt

SEQ ID NO: 1649 - DNA, 11 bp, Artificial sequence
  Synthetic
acacacatggt

SEQ ID NO: 1650 - DNA, 11 bp, Artificial sequence
  Synthetic
tggaacatggt

SEQ ID NO: 1651 - DNA, 11 bp, Artificial sequence
  Synthetic
gctgtcatggt

SEQ ID NO: 1652 - DNA, 11 bp, Artificial sequence
  Synthetic
gagaagatggt

SEQ ID NO: 1653 - DNA, 11 bp, Artificial sequence
  Synthetic
aatatcatggt

SEQ ID NO: 1654 - DNA, 11 bp, Artificial sequence
  Synthetic
tcccgaatggt

SEQ ID NO: 1655 - DNA, 11 bp, Artificial sequence
  Synthetic
atcagaatggt

SEQ ID NO: 1656 - DNA, 11 bp, Artificial sequence
  Synthetic
acatacatggt

SEQ ID NO: 1657 - DNA, 11 bp, Artificial sequence
  Synthetic
gccaacatggt

SEQ ID NO: 1658 - DNA, 11 bp, Artificial sequence
  Synthetic
tatttaatggt

SEQ ID NO: 1659 - DNA, 9 bp, Artificial sequence
  Synthetic
atggtaagc

SEQ ID NO: 1660 - DNA, 9 bp, Artificial sequence
  Synthetic
atggtgcgc

SEQ ID NO: 1661 - DNA, 9 bp, Artificial sequence
  Synthetic
atggtatgc

SEQ ID NO: 1662 - DNA, 9 bp, Artificial sequence
  Synthetic
atggtattt

SEQ ID NO: 1663 - DNA, 9 bp, Artificial sequence
  Synthetic
atggtacat

SEQ ID NO: 1664 - DNA, 9 bp, Artificial sequence
  Synthetic
atggtaagt

SEQ ID NO: 1665 - DNA, 9 bp, Artificial sequence
  Synthetic
atggttagt

SEQ ID NO: 1666 - DNA, 9 bp, Artificial sequence
  Synthetic
atggtaaga

SEQ ID NO: 1667 - DNA, 9 bp, Artificial sequence
  Synthetic
atggtatgt

SEQ ID NO: 1668 - DNA, 9 bp, Artificial sequence
  Synthetic
atggtacgg

SEQ ID NO: 1669 - DNA, 9 bp, Artificial sequence
  Synthetic
atggtaaga

SEQ ID NO: 1670 - DNA, 9 bp, Artificial sequence
  Synthetic
atggtatgt

SEQ ID NO: 1671 - DNA, 9 bp, Artificial sequence
  Synthetic
atggtaaga

SEQ ID NO: 1672 - DNA, 9 bp, Artificial sequence
  Synthetic
atggttagt

SEQ ID NO: 1673 - DNA, 9 bp, Artificial sequence
  Synthetic
atggtaagc

SEQ ID NO: 1674 - DNA, 9 bp, Artificial sequence
  Synthetic
atggtgagt

SEQ ID NO: 1675 - DNA, 9 bp, Artificial sequence
  Synthetic
atggtgagt

SEQ ID NO: 1676 - DNA, 9 bp, Artificial sequence
  Synthetic
atggtaagg

SEQ ID NO: 1677 - DNA, 9 bp, Artificial sequence
  Synthetic
atggtaagc

SEQ ID NO: 1678 - DNA, 9 bp, Artificial sequence
  Synthetic
atggtgagt

SEQ ID NO: 1679 - DNA, 9 bp, Artificial sequence
  Synthetic
atggtaagc

SEQ ID NO: 1680 - DNA, 9 bp, Artificial sequence
  Synthetic
atggtacgc

SEQ ID NO: 1681 - DNA, 9 bp, Artificial sequence
  Synthetic
atggtacgt

SEQ ID NO: 1682 - DNA, 9 bp, Artificial sequence
  Synthetic
atggtaggt

SEQ ID NO: 1683 - DNA, 9 bp, Artificial sequence
  Synthetic
atggtatgt

SEQ ID NO: 1684 - DNA, 9 bp, Artificial sequence
  Synthetic
atggtacgc

SEQ ID NO: 1685 - DNA, 9 bp, Artificial sequence
  Synthetic
atggtaggc

SEQ ID NO: 1686 - DNA, 9 bp, Artificial sequence
  Synthetic
atggtaggc

SEQ ID NO: 1687 - DNA, 9 bp, Artificial sequence
  Synthetic
atggtgcgc

SEQ ID NO: 1688 - DNA, 9 bp, Artificial sequence
  Synthetic
atggtgagt

SEQ ID NO: 1689 - DNA, 9 bp, Artificial sequence
  Synthetic
atggtgagg

SEQ ID NO: 1690 - DNA, 9 bp, Artificial sequence
  Synthetic
atggtgcgc

SEQ ID NO: 1691 - DNA, 9 bp, Artificial sequence
  Synthetic
atggtaagt

SEQ ID NO: 1692 - DNA, 9 bp, Artificial sequence
  Synthetic
atggttagt

SEQ ID NO: 1693 - DNA, 9 bp, Artificial sequence
  Synthetic
atggtaagt

SEQ ID NO: 1694 - DNA, 9 bp, Artificial sequence
  Synthetic
atggtaagc

SEQ ID NO: 1695 - DNA, 9 bp, Artificial sequence
  Synthetic
atggtaagc

SEQ ID NO: 1696 - DNA, 9 bp, Artificial sequence
  Synthetic
atggtaatg

SEQ ID NO: 1697 - DNA, 9 bp, Artificial sequence
  Synthetic
atggtaagg

SEQ ID NO: 1698 - DNA, 9 bp, Artificial sequence
  Synthetic
atggtattt

SEQ ID NO: 1699 - DNA, 9 bp, Artificial sequence
  Synthetic
atggtgagt

SEQ ID NO: 1700 - DNA, 9 bp, Artificial sequence
  Synthetic
atggtaagc

SEQ ID NO: 1701 - DNA, 9 bp, Artificial sequence
  Synthetic
atggtaatg

SEQ ID NO: 1702 - DNA, 9 bp, Artificial sequence
  Synthetic
atggtgaga

SEQ ID NO: 1703 - DNA, 9 bp, Artificial sequence
  Synthetic
atggtatgc

SEQ ID NO: 1704 - DNA, 9 bp, Artificial sequence
  Synthetic
atggtaggt

SEQ ID NO: 1705 - DNA, 9 bp, Artificial sequence
  Synthetic
atggtgcgc

SEQ ID NO: 1706 - DNA, 9 bp, Artificial sequence
  Synthetic
atggtactt

SEQ ID NO: 1707 - DNA, 9 bp, Artificial sequence
  Synthetic
atggtgagt

SEQ ID NO: 1708 - DNA, 9 bp, Artificial sequence
  Synthetic
atggtgagt

SEQ ID NO: 1709 - DNA, 9 bp, Artificial sequence
  Synthetic
atggtaaga

SEQ ID NO: 1710 - DNA, 9 bp, Artificial sequence
  Synthetic
atggtgagt

SEQ ID NO: 1711 - DNA, 9 bp, Artificial sequence
  Synthetic
atggtacgg

SEQ ID NO: 1712 - DNA, 9 bp, Artificial sequence
  Synthetic
atggtaggt

SEQ ID NO: 1713 - DNA, 9 bp, Artificial sequence
  Synthetic
atggtaccc

SEQ ID NO: 1714 - DNA, 9 bp, Artificial sequence
  Synthetic
atggtaagt

SEQ ID NO: 1715 - DNA, 9 bp, Artificial sequence
  Synthetic
atggtaagt

SEQ ID NO: 1716 - DNA, 9 bp, Artificial sequence
  Synthetic
atggtaagt

SEQ ID NO: 1717 - DNA, 9 bp, Artificial sequence
  Synthetic
atggtacat

SEQ ID NO: 1718 - DNA, 9 bp, Artificial sequence
  Synthetic
atggtaggt

SEQ ID NO: 1719 - DNA, 9 bp, Artificial sequence
  Synthetic
atggtgagt

SEQ ID NO: 1720 - DNA, 9 bp, Artificial sequence
  Synthetic
atggtgagt

SEQ ID NO: 1721 - DNA, 9 bp, Artificial sequence
  Synthetic
atggtgagt

SEQ ID NO: 1722 - DNA, 9 bp, Artificial sequence
  Synthetic
atggtaagt

SEQ ID NO: 1723 - DNA, 9 bp, Artificial sequence
  Synthetic
atggtcaga

SEQ ID NO: 1724 - DNA, 9 bp, Artificial sequence
  Synthetic
atggtagga

SEQ ID NO: 1725 - DNA, 9 bp, Artificial sequence
  Synthetic
atggtaggt

SEQ ID NO: 1726 - DNA, 9 bp, Artificial sequence
  Synthetic
atggttagg

SEQ ID NO: 1727 - DNA, 9 bp, Artificial sequence
  Synthetic
atggtacgc

SEQ ID NO: 1728 - DNA, 9 bp, Artificial sequence
  Synthetic
atggtgcgc

SEQ ID NO: 1729 - DNA, 9 bp, Artificial sequence
  Synthetic
atggtaacc

SEQ ID NO: 1730 - DNA, 9 bp, Artificial sequence
  Synthetic
atggtgcgg

SEQ ID NO: 1731 - DNA, 9 bp, Artificial sequence
  Synthetic
atggttagt

SEQ ID NO: 1732 - DNA, 9 bp, Artificial sequence
  Synthetic
atggtgagt

SEQ ID NO: 1733 - DNA, 9 bp, Artificial sequence
  Synthetic
atggtaaga

SEQ ID NO: 1734 - DNA, 9 bp, Artificial sequence
  Synthetic
atggtacgt

SEQ ID NO: 1735 - DNA, 9 bp, Artificial sequence
  Synthetic
atggtgagt

SEQ ID NO: 1736 - DNA, 9 bp, Artificial sequence
  Synthetic
atggtaaga

SEQ ID NO: 1737 - DNA, 9 bp, Artificial sequence
  Synthetic
atggtaagt

SEQ ID NO: 1738 - DNA, 9 bp, Artificial sequence
  Synthetic
atggtaaat

SEQ ID NO: 1739 - DNA, 9 bp, Artificial sequence
  Synthetic
atggtacga

SEQ ID NO: 1740 - DNA, 9 bp, Artificial sequence
  Synthetic
atggtagga

SEQ ID NO: 1741 - DNA, 9 bp, Artificial sequence
  Synthetic
atggtaggt

SEQ ID NO: 1742 - DNA, 9 bp, Artificial sequence
  Synthetic
atggtacgt

SEQ ID NO: 1743 - DNA, 9 bp, Artificial sequence
  Synthetic
atggttcgt

SEQ ID NO: 1744 - DNA, 9 bp, Artificial sequence
  Synthetic
atggtgggt

SEQ ID NO: 1745 - DNA, 9 bp, Artificial sequence
  Synthetic
atggtacga

SEQ ID NO: 1746 - DNA, 9 bp, Artificial sequence
  Synthetic
atggtaagt

SEQ ID NO: 1747 - DNA, 9 bp, Artificial sequence
  Synthetic
atggtaagt

SEQ ID NO: 1748 - DNA, 9 bp, Artificial sequence
  Synthetic
atggtgagt

SEQ ID NO: 1749 - DNA, 9 bp, Artificial sequence
  Synthetic
atggtaagc

SEQ ID NO: 1750 - DNA, 9 bp, Artificial sequence
  Synthetic
atggtaggc

SEQ ID NO: 1751 - DNA, 9 bp, Artificial sequence
  Synthetic
atggtaggt

SEQ ID NO: 1752 - DNA, 9 bp, Artificial sequence
  Synthetic
atggtaagg

SEQ ID NO: 1753 - DNA, 9 bp, Artificial sequence
  Synthetic
atggtatgt

SEQ ID NO: 1754 - DNA, 9 bp, Artificial sequence
  Synthetic
atggtaaag

SEQ ID NO: 1755 - DNA, 9 bp, Artificial sequence
  Synthetic
atggtaagt

SEQ ID NO: 1756 - DNA, 9 bp, Artificial sequence
  Synthetic
atggtacga

SEQ ID NO: 1757 - DNA, 9 bp, Artificial sequence
  Synthetic
atggtagat

SEQ ID NO: 1758 - DNA, 9 bp, Artificial sequence
  Synthetic
atggtgggt

SEQ ID NO: 1759 - DNA, 9 bp, Artificial sequence
  Synthetic
atggtcagc

SEQ ID NO: 1760 - DNA, 9 bp, Artificial sequence
  Synthetic
atggtgagc

SEQ ID NO: 1761 - DNA, 9 bp, Artificial sequence
  Synthetic
atggtaagc

SEQ ID NO: 1762 - DNA, 9 bp, Artificial sequence
  Synthetic
atggtaggc

SEQ ID NO: 1763 - DNA, 9 bp, Artificial sequence
  Synthetic
atggtaaga

SEQ ID NO: 1764 - DNA, 9 bp, Artificial sequence
  Synthetic
atggtaagc

SEQ ID NO: 1765 - DNA, 9 bp, Artificial sequence
  Synthetic
atggtaagg

SEQ ID NO: 1766 - DNA, 9 bp, Artificial sequence
  Synthetic
atggtgggt

SEQ ID NO: 1767 - DNA, 9 bp, Artificial sequence
  Synthetic
atggtgagt

SEQ ID NO: 1768 - DNA, 9 bp, Artificial sequence
  Synthetic
atggttggt

SEQ ID NO: 1769 - DNA, 9 bp, Artificial sequence
  Synthetic
atggttagt

SEQ ID NO: 1770 - DNA, 9 bp, Artificial sequence
  Synthetic
atggtttgt

SEQ ID NO: 1771 - DNA, 9 bp, Artificial sequence
  Synthetic
atggtactt

SEQ ID NO: 1772 - DNA, 9 bp, Artificial sequence
  Synthetic
atggtgaac

SEQ ID NO: 1773 - DNA, 9 bp, Artificial sequence
  Synthetic
atggtgacc

SEQ ID NO: 1774 - DNA, 9 bp, Artificial sequence
  Synthetic
atggtaggt

SEQ ID NO: 1775 - DNA, 9 bp, Artificial sequence
  Synthetic
atggtaata

SEQ ID NO: 1776 - DNA, 9 bp, Artificial sequence
  Synthetic
atggtgagg

SEQ ID NO: 1777 - DNA, 9 bp, Artificial sequence
  Synthetic
atggtaaat

SEQ ID NO: 1778 - DNA, 9 bp, Artificial sequence
  Synthetic
atggtaacg

SEQ ID NO: 1779 - DNA, 9 bp, Artificial sequence
  Synthetic
atggtgagg

SEQ ID NO: 1780 - DNA, 9 bp, Artificial sequence
  Synthetic
atggtaaat

SEQ ID NO: 1781 - DNA, 9 bp, Artificial sequence
  Synthetic
atggtgagg

SEQ ID NO: 1782 - DNA, 9 bp, Artificial sequence
  Synthetic
atggtaata

SEQ ID NO: 1783 - DNA, 9 bp, Artificial sequence
  Synthetic
atggtatgc

SEQ ID NO: 1784 - DNA, 9 bp, Artificial sequence
  Synthetic
atggtacgg

SEQ ID NO: 1785 - DNA, 9 bp, Artificial sequence
  Synthetic
atggtacgc

SEQ ID NO: 1786 - DNA, 9 bp, Artificial sequence
  Synthetic
atggtaggc

SEQ ID NO: 1787 - DNA, 9 bp, Artificial sequence
  Synthetic
atggttagt

SEQ ID NO: 1788 - DNA, 9 bp, Artificial sequence
  Synthetic
atggtacgg

SEQ ID NO: 1789 - DNA, 9 bp, Artificial sequence
  Synthetic
atggtgaga

SEQ ID NO: 1790 - DNA, 9 bp, Artificial sequence
  Synthetic
atggtaatt

SEQ ID NO: 1791 - DNA, 9 bp, Artificial sequence
  Synthetic
atggtacga

SEQ ID NO: 1792 - DNA, 9 bp, Artificial sequence
  Synthetic
atggtgcgc

SEQ ID NO: 1793 - DNA, 9 bp, Artificial sequence
  Synthetic
atggtaaat

SEQ ID NO: 1794 - DNA, 9 bp, Artificial sequence
  Synthetic
atggtatga

SEQ ID NO: 1795 - DNA, 9 bp, Artificial sequence
  Synthetic
atggtaacc

SEQ ID NO: 1796 - DNA, 9 bp, Artificial sequence
  Synthetic
atggtaatg

SEQ ID NO: 1797 - DNA, 9 bp, Artificial sequence
  Synthetic
atggtgcga

SEQ ID NO: 1798 - DNA, 9 bp, Artificial sequence
  Synthetic
atggtgagc

SEQ ID NO: 1799 - DNA, 9 bp, Artificial sequence
  Synthetic
atggtgcgg

SEQ ID NO: 1800 - DNA, 9 bp, Artificial sequence
  Synthetic
atggtgggc

SEQ ID NO: 1801 - DNA, 9 bp, Artificial sequence
  Synthetic
atggtaagc

SEQ ID NO: 1802 - DNA, 9 bp, Artificial sequence
  Synthetic
atggtaata

SEQ ID NO: 1803 - DNA, 9 bp, Artificial sequence
  Synthetic
atggtaggt

SEQ ID NO: 1804 - DNA, 9 bp, Artificial sequence
  Synthetic
atggtatgc

SEQ ID NO: 1805 - DNA, 9 bp, Artificial sequence
  Synthetic
atggttagt

SEQ ID NO: 1806 - DNA, 9 bp, Artificial sequence
  Synthetic
atggttagg

SEQ ID NO: 1807 - DNA, 9 bp, Artificial sequence
  Synthetic
atggtaggc

SEQ ID NO: 1808 - DNA, 9 bp, Artificial sequence
  Synthetic
atggtgaac

SEQ ID NO: 1809 - DNA, 9 bp, Artificial sequence
  Synthetic
atggtacgg

SEQ ID NO: 1810 - DNA, 9 bp, Artificial sequence
  Synthetic
atggtatgc

SEQ ID NO: 1811 - DNA, 9 bp, Artificial sequence
  Synthetic
atggtacag

SEQ ID NO: 1812 - DNA, 9 bp, Artificial sequence
  Synthetic
atggttggt

SEQ ID NO: 1813 - DNA, 9 bp, Artificial sequence
  Synthetic
atggtactt

SEQ ID NO: 1814 - DNA, 9 bp, Artificial sequence
  Synthetic
atggtgcgc

SEQ ID NO: 1815 - DNA, 9 bp, Artificial sequence
  Synthetic
atggtgggc

SEQ ID NO: 1816 - DNA, 9 bp, Artificial sequence
  Synthetic
atggtgatt

SEQ ID NO: 1817 - DNA, 9 bp, Artificial sequence
  Synthetic
atggtacgg

SEQ ID NO: 1818 - DNA, 9 bp, Artificial sequence
  Synthetic
atggtacgg

SEQ ID NO: 1819 - DNA, 9 bp, Artificial sequence
  Synthetic
atggtgagg

SEQ ID NO: 1820 - DNA, 9 bp, Artificial sequence
  Synthetic
atggtacgg

SEQ ID NO: 1821 - DNA, 9 bp, Artificial sequence
  Synthetic
atggttcgt

SEQ ID NO: 1822 - DNA, 9 bp, Artificial sequence
  Synthetic
atggtatgg

SEQ ID NO: 1823 - DNA, 9 bp, Artificial sequence
  Synthetic
atggtagtt

SEQ ID NO: 1824 - DNA, 9 bp, Artificial sequence
  Synthetic
atggtacgt

SEQ ID NO: 1825 - DNA, 9 bp, Artificial sequence
  Synthetic
atggtacgt

SEQ ID NO: 1826 - DNA, 9 bp, Artificial sequence
  Synthetic
atggtaagc

SEQ ID NO: 1827 - DNA, 9 bp, Artificial sequence
  Synthetic
atggtgacc

SEQ ID NO: 1828 - DNA, 9 bp, Artificial sequence
  Synthetic
atggtagga

SEQ ID NO: 1829 - DNA, 9 bp, Artificial sequence
  Synthetic
atggtacgg

SEQ ID NO: 1830 - DNA, 9 bp, Artificial sequence
  Synthetic
atggtacgc

SEQ ID NO: 1831 - DNA, 9 bp, Artificial sequence
  Synthetic
atggtgagc

SEQ ID NO: 1832 - DNA, 9 bp, Artificial sequence
  Synthetic
atggtaagc

SEQ ID NO: 1833 - DNA, 9 bp, Artificial sequence
  Synthetic
atggtgaag

SEQ ID NO: 1834 - DNA, 9 bp, Artificial sequence
  Synthetic
atggtaaac

SEQ ID NO: 1835 - DNA, 9 bp, Artificial sequence
  Synthetic
atggtgcgc

SEQ ID NO: 1836 - DNA, 9 bp, Artificial sequence
  Synthetic
atggttgga

SEQ ID NO: 1837 - DNA, 9 bp, Artificial sequence
  Synthetic
atggtaatt

SEQ ID NO: 1838 - DNA, 9 bp, Artificial sequence
  Synthetic
atggtaaca

SEQ ID NO: 1839 - DNA, 9 bp, Artificial sequence
  Synthetic
atggtcggt

SEQ ID NO: 1840 - DNA, 9 bp, Artificial sequence
  Synthetic
atggtattt

SEQ ID NO: 1841 - DNA, 9 bp, Artificial sequence
  Synthetic
atggtaata

SEQ ID NO: 1842 - DNA, 9 bp, Artificial sequence
  Synthetic
atggtgagc

SEQ ID NO: 1843 - DNA, 9 bp, Artificial sequence
  Synthetic
atggtgagg

SEQ ID NO: 1844 - DNA, 9 bp, Artificial sequence
  Synthetic
atggtacga

SEQ ID NO: 1845 - DNA, 9 bp, Artificial sequence
  Synthetic
atggtatgt

SEQ ID NO: 1846 - DNA, 9 bp, Artificial sequence
  Synthetic
atggtgagg

SEQ ID NO: 1847 - DNA, 9 bp, Artificial sequence
  Synthetic
atggtaggt

SEQ ID NO: 1848 - DNA, 9 bp, Artificial sequence
  Synthetic
atggtaccc

SEQ ID NO: 1849 - DNA, 9 bp, Artificial sequence
  Synthetic
atggtaacg

SEQ ID NO: 1850 - DNA, 9 bp, Artificial sequence
  Synthetic
atggtaaaa

SEQ ID NO: 1851 - DNA, 9 bp, Artificial sequence
  Synthetic
atggtgcgc

SEQ ID NO: 1852 - DNA, 9 bp, Artificial sequence
  Synthetic
atggtacga

SEQ ID NO: 1853 - DNA, 9 bp, Artificial sequence
  Synthetic
atggtaatc

SEQ ID NO: 1854 - DNA, 9 bp, Artificial sequence
  Synthetic
atggtaccc

SEQ ID NO: 1855 - DNA, 9 bp, Artificial sequence
  Synthetic
atggtgcgg

SEQ ID NO: 1856 - DNA, 9 bp, Artificial sequence
  Synthetic
atggtaaga

SEQ ID NO: 1857 - DNA, 9 bp, Artificial sequence
  Synthetic
atggtaggt

SEQ ID NO: 1858 - DNA, 9 bp, Artificial sequence
  Synthetic
atggtgagc

SEQ ID NO: 1859 - DNA, 9 bp, Artificial sequence
  Synthetic
atggtgaga

SEQ ID NO: 1860 - DNA, 9 bp, Artificial sequence
  Synthetic
atggtaaag

SEQ ID NO: 1861 - DNA, 9 bp, Artificial sequence
  Synthetic
atggtatgg

SEQ ID NO: 1862 - DNA, 9 bp, Artificial sequence
  Synthetic
atggtgaga

SEQ ID NO: 1863 - DNA, 9 bp, Artificial sequence
  Synthetic
atggtaaat

SEQ ID NO: 1864 - DNA, 9 bp, Artificial sequence
  Synthetic
atggttagg

SEQ ID NO: 1865 - DNA, 9 bp, Artificial sequence
  Synthetic
atggtacgt

SEQ ID NO: 1866 - DNA, 9 bp, Artificial sequence
  Synthetic
atggtaggg

SEQ ID NO: 1867 - DNA, 9 bp, Artificial sequence
  Synthetic
atggtagaa

SEQ ID NO: 1868 - DNA, 9 bp, Artificial sequence
  Synthetic
atggtactg

SEQ ID NO: 1869 - DNA, 9 bp, Artificial sequence
  Synthetic
atggtagcc

SEQ ID NO: 1870 - DNA, 9 bp, Artificial sequence
  Synthetic
atggtgggt

SEQ ID NO: 1871 - DNA, 9 bp, Artificial sequence
  Synthetic
atggttagt

SEQ ID NO: 1872 - DNA, 9 bp, Artificial sequence
  Synthetic
atggtaaag

SEQ ID NO: 1873 - DNA, 9 bp, Artificial sequence
  Synthetic
atggtgagg

SEQ ID NO: 1874 - DNA, 9 bp, Artificial sequence
  Synthetic
atggttagt

SEQ ID NO: 1875 - DNA, 9 bp, Artificial sequence
  Synthetic
atggtaggc

SEQ ID NO: 1876 - DNA, 9 bp, Artificial sequence
  Synthetic
atggtactg

SEQ ID NO: 1877 - DNA, 9 bp, Artificial sequence
  Synthetic
atggtacgc

SEQ ID NO: 1878 - DNA, 9 bp, Artificial Sequence
  Synthetic
atggtactc

SEQ ID NO: 1879 - DNA, 141 bp, Artificial Sequence
  Synthetic
cctgcaggcagctgcgcgctcgctcgctcactgaggccgcccgggcaaagcccgggcgtcgggcgacctttggtcgcccggcctcagtgagcgagcgagcgcgcagagagggagtggccaactccatcactaggggttcct

SEQ ID NO: 1880 - DNA, 782 bp, Artificial Sequence
  Synthetic
ggtaccacccttcagattaaaaataactgaggtaagggcctgggtaggggaggtggtgtgagacgctcctgtctctcctctatctgcccatcggccctttggggaggaggaatgtgcccaaggactaaaaaaaggccatggagccagaggggcgagggcaacagacctttcatgggcaaaccttggggccctgctgtctagcatgccccactacgggtctaggctgcccatgtaaggaggcaaggcctggggacacccgagatgcctggttataattaacccagacatgtggctgcccccccccccccaacacctgctgcctctaaaaataaccctgtccctggtggatcccctgcatgcgaagatcttcgaacaaggctgtgggggactgagggcaggctgtaacaggcttgggggccagggcttatacgtgcctgggactcccaaagtattactgttccatgttcccggcgaagggccagctgtcccccgccagctagactcagcacttagtttaggaaccagtgagcaagtcagcccttggggcagcccatacaaggccatggggctgggcaagctgcacgcctgggtccggggtgggcacggtgcccgggcaacgagctgaaagctcatctgctctcaggggcccctccctggggacagcccctcctggctagtcacaccctgtaggctcctctatataacccaggggcacaggggctgccctcattctaccaccacctccacagcacagacagacactcaggagccagccagctagc

SEQ ID NO: 1881 - DNA, 1846 bp, Artificial Sequence
  Synthetic
  misc_feature (164)..(173): n is a, c, g, or t
gcttctgcatcaacttctaaatataattcacactccttggagaatgagtctataaagaggacgtctcgagatggagtgaatcgagatctcactgaggctgttcctcgacttccaggagaaacactaatcactgacaaagaagttatttacatatgtccatttannnnnnnnnnatggccccattaagggaagagtttacatcacaaattatcgtctttatttaagaagtttggaaacggattcttctctaatacttgatgttcctctgggtgtgatctcgagaattgaaaaaatgggaggcgcgacaagtagaggagaaaattcctatggtctagatattacttgtaaagacatgagaaacctgaggttcgctttgaaacaggaaggccacagcagaagagatatgtttgagatcctcacgagatacgcgtttcccctggctcacagtctgccattatttgcatttttaaatgaagaaaagtttaacgtggatggatggacagtttacaatccagtggaagaatacaggaggcagggcttgcccaatcaccattggagaataacttttattaataagtgctatgagctctgtgacacttaccctgctcttttggtggttccgtatcgtgcctcagatgatgacctccggagagttgcaacttttaggtcccgaaatcgaattccagtgctgtcatggattcatccagaaaataagacggtcattgtgcgttgcagtcagcctcttgtcggtatgagtgggaaacgaaataaagatgatgagaaatatctcgatgttatcagggagactaataaacaaatttctaaactcaccatttatgatgcaagacccagcgtaaatgcagtggccaacaaggcaacaggaggaggatatgaaagtgatgatgcatatcataacgccgaacttttcttcttagacattcataatattcatgttatgcgggaatctttaaaaaaagtgaaggacattgtttatcctaatgtagaagaatctcattggttgtccagtttggagtctactcattggttagaacatatcaagctcgttttgacaggagccattcaagtagcagacaaagtttcttcagggaagagttcagtgcttgtgcattgcagtgacggatgggacaggactgctcagctgacatccttggccatgctgatgttggatagcttctataggagcattgaagggttcgaaatactggtacaaaaagaatggataagttttggacataaatttgcatctcgaataggtcatggtgataaaaaccacaccgatgctgaccgttctcctatttttctccagtttattgattgtgtgtggcaaatgtcaaaacagttccctacagcttttgaattcaatgaacaatttttgattataattttggatcatctgtatagttgccgatttggtactttcttattcaactgtgaatctgctcgagaaagacagaaggttacagaaaggactgtttctttatggtcactgataaacagtaataaagaaaaattcaaaaaccccttctatactaaagaaatcaatcgagttttatatccagttgccagtatgcgtcacttggaactctgggtgaattactacattagatggaaccccaggatcaagcaacaacagccgaatccagtggagcagcgttacatggagctcttagccttacgcgacgaatacataaagcggcttgaggaactgcagctcgccaactctgccaagctttctgatcccccaacttcaccttccagtccttcgcaaatgatgccccatgtgcaaactcacttctacccatacgacgtaccagattacgcttag

SEQ ID NO: 1882 - DNA, 2500 bp, Artificial Sequence
  Synthetic
  misc_feature (226)..(235): n is a, c, g, or t
ccgaccgtcattagcgcatctgtggctccaaggacagcggctgagccccggtccccagggccagttcctcacccggcccagagcaaggccactgaggctgggggtggaaacccaagtggcatctattcagccatcatcagccgcaattttcctattatcggagtgaaagagaagacattcgagcaacttcacaagaaatgtcttgaaaagaaagttctttatgtannnnnnnnnngaccctgagttcccaccggacgagacctctctcttttatagccagaagttccccatccagttcgtctggaagagacctccggaaatatgtgagaatccccgatttatcattgatggagccaacagaactgacatctgtcaaggagagctaggggactgctggtttctcgcagccattgcctgcctgaccctgaaccagcaccttcttttccgagtcataccccatgatcaaagtttcatcgaaaactacgcagggatcttccacttccagttctggcgctatggagagtgggtggacgtggttatagatgactgcctgccaacgtacaacaatcaactggttttcaccaagtccaaccaccgcaatgagttctggagtgctctgctggagaaggcttatgctaagctccatggttcctacgaagctctgaaaggtgggaacaccacagaggccatggaggacttcacaggaggggtggcagagttttttgagatcagggatgctcctagtgacatgtacaagatcatgaagaaagccatcgagagaggctccctcatgggctgctccattgatgatggcacgaacatgacctatggaacctctccttctggtctgaacatgggggagttgattgcacggatggtaaggaatatggataactcactgctccaggactcagacctcgaccccagaggctcagatgaaagaccgacccggacaatcattccggttcagtatgagacaagaatggcctgcgggctggtcagaggtcacgcctactctgtcacggggctggatgaggtcccgttcaaaggtgagaaagtgaagctggtgcggctgcggaatccgtggggccaggtggagtggaacggttcttggagtgatagatggaaggactggagctttgtggacaaagatgagaaggcccgtctgcagcaccaggtcactgaggatggagagttctggatgtcctatgaggatttcatctaccatttcacaaagttggagatctgcaacctcacggccgatgctctgcagtctgacaagcttcagacctggacagtgtctgtgaacgagggccgctgggtacggggttgctctgccggaggctgccgcaacttcccagatactttctggaccaaccctcagtaccgtctgaagctcctggaggaggacgatgaccctgatgactcggaggtgatttgcagcttcctggtggccctgatgcagaagaaccggcggaaggaccggaagctaggggccagtctcttcaccattggcttcgccatctacgaggttcccaaagagatgcacgggaacaagcagcacctgcagaaggacttcttcctgtacaacgcctccaaggccaggagcaaaacctacatcaacatgcgggaggtgtcccagcgcttccgcctgcctcccagcgagtacgtcatcgtgccctccacctacgagccccaccaggagggggaattcatcctccgggtcttctctgaaaagaggaacctctctgaggaagttgaaaataccatctccgtggatcggccagtgaaaaagaaaaaaaccaagcccatcatcttcgtttcggacagagcaaacagcaacaaggagctgggtgtggaccaggagtcagaggagggcaaaggcaaaacaagccctgataagcaaaagcagtccccacagccacagcctggcagctctgatcaggaaagtgaggaacagcaacaattccggaacattttcaagcagatagcaggagatgacatggagatctgtgcagatgagctcaagaaggtccttaacacagtcgtgaacaaacacaaggacctgaagacacacgggttcacactggagtcctgccgtagcatgattgcgctcatggatacagatggctctggaaagctcaacctgcaggagttccaccacctctggaacaagattaaggcctggcagaaaattttcaaacactatgacacagaccagtccggcaccatcaacagctacgagatgcgaaatgcagtcaacgacgcaggattccacctcaacaaccagctctatgacatcattaccatgcggtacgcagacaaacacatgaacatcgactttgacagtttcatctgctgcttcgttaggctggagggcatgttcagagcttttcatgcatttgacaaggatggagatggtatcatcaagctcaacgttctggagtggctgcagctcaccatgtatgcctacccatacgacgtaccagattacgcttag

SEQ ID NO: 1883 - DNA, 135 bp, Artificial Sequence
  Synthetic
cttaagatacattgatgagtttggacaaaccacaactagaatgcagtgaaaaaaatgctttatttgtgaaatttgtgatgctattgctttatttgtaaccattataagctgcaataaacaagttctgattttgta

SEQ ID NO: 1884 - DNA, 122 bp, Artificial Sequence
  Synthetic
aaaatccctgcaccagaacccgctctcccgccccggggaggttttgattttagtggctttcttccttttattttccgtcgtgtgcggatttcgctgcagagcgaacttgcggctcgtccgag

SEQ ID NO: 1885 - DNA, 122 bp, Artificial Sequence
  Synthetic
tccgccttccccggagctgtgtcggcccaggactgcagggcgtgagcccagaccccggccctcgcctccctcactgccctgccgtcccgggagacttacagcgcgaggggccgctgggtcac

SEQ ID NO: 1886 - DNA, 122 bp, Artificial Sequence
  Synthetic
cacggccagcccgcatccacccaatgccaggcctcagggccaagagggctcagcctcagcacggggggagccctggggtggggagacgcgagcgcccacctgcgcaccccagcagccttccg

SEQ ID NO: 1887 - DNA, 122 bp, Artificial Sequence
  Synthetic
acctaaatccctacctagcatgatcagtttggtttcgctgtacaccagacagccaaaacttgcaaggttttgattgaacaacaaatactgcgtgcttactctgtaccaagcatcaggactag

SEQ ID NO: 1888 - DNA, 122 bp, Artificial Sequence
  Synthetic
ccgtttttttacagcttttctgacacagcgggaccacgctcgcggcaccacagctctcgggaggtgacccggagataatggcccagtaggaacactcaccatagcgtctgtcttggtagtct

SEQ ID NO: 1889 - DNA, 122 bp, Artificial Sequence
  Synthetic
acacacacaatatagttgctacatatattttcatatttcttaataagctatctcattttattttgtataaaaacgaactctctattcaaaatctcttacctgataaaacaagagatgaattt

SEQ ID NO: 1890 - DNA, 122 bp, Artificial Sequence
  Synthetic
tcaacaatagtgttacttttgaccctttaattgtaccacctgtgcgcatcataccaagccttgcatcttcatcagtggcaaaaacgatgaaagcctcacccagttcaccccctacaatatgc

SEQ ID NO: 1891 - DNA, 122 bp, Artificial Sequence
  Synthetic
cttgatttgcatgctagaaaataaaacgttttggttaatttttggtatcttatgccaagccccaagtaggaaatgggtatctacctcctgtccacttacatttcgtggggttctccgggtca

SEQ ID NO: 1892 - DNA, 122 bp, Artificial Sequence
  Synthetic
gctaggggtagtctgtctaagtgaacagaaggacattgttgaaagtgaagtatcattatttttattcctgcatcgtcttttgttctttattcttggcagcggtaaaactcctccaggcagct

SEQ ID NO: 1893 - DNA, 122 bp, Artificial Sequence
  Synthetic
ttgaaaatgttttctttctaaactacacttttaaagttacttgtgaaaaaaagcaaacacttttttgttataacagcttagaaattggttgtgactcacggctcgatgaacatgaggctttc

SEQ ID NO: 1894 - DNA, 122 bp, Artificial Sequence
  Synthetic
gagacttaagttaaaacaaaattcaacatagaaaaaccgtcactgcctatacagcactcatgtcagagtgttccatgaggtcccccaaaatgcacctaccgtcccagccaggatgtcatggg

SEQ ID NO: 1895 - DNA, 122 bp, Artificial Sequence
  Synthetic
tttattcttgcatataaacagaatacatgtaataactacatattctatgaaatattccaaaactactatagttttattaaaatttgcaaaagtaccaaccttttagagaactgtttctcaga

SEQ ID NO: 1896 - DNA, 107 bp, Artificial Sequence
  Synthetic
cagacagacataagaagagttttcaaattttagtggctctgcagcctctatcaatacagaggaaatactgtggatcaaatgataagtaatggctcttaccttggctt

SEQ ID NO: 1897 - DNA, 122 bp, Artificial Sequence
  Synthetic
atttcacaccatcctactttagagagtaaattatcagcctgtcctggtttggatgagtctactgtttcagcctggttcagcccagtgtctcctctttaggtccgtatctctcttatgaaaga

SEQ ID NO: 1898 - DNA, 122 bp, Artificial Sequence
  Synthetic
ttttccacatttatataaattgaatcgtataatatgtgtcctcttgcttctggctgtatttactattaatcagttctgttgtattttatttttaaacagatttctccttaaaaatatcagtc

SEQ ID NO: 1899 - DNA, 122 bp, Artificial Sequence
  Synthetic
tcaaaaaactttgtacctcttatacttttatgtaatagcattcagacattcctatttcgttatcgaagggtttgctcttacgacaaaacaaaaactcaccttgagacaaccataaccaagtt

SEQ ID NO: 1900 - DNA, 122 bp, Artificial Sequence
  Synthetic
gttcctctttggaaaaggtttgcataacctgtgactcttttaaccctccccacagctcactggatctgcttaatgacttgcttgtgttattgcttccaggtcaggggtcaccacattgcaaa

SEQ ID NO: 1901 - DNA, 122 bp, Artificial Sequence
  Synthetic
aattttaatgtaattttactttttttttaccccttccctctttttttttcttctgtccttttgtgtgtgtccttccctctcatcgttggccactcatagatacgagggcaccatgtagcaca

SEQ ID NO: 1902 - DNA, 122 bp, Artificial Sequence
  Synthetic
ttaaaataacagttcaattctgtgtttgaaaaaaaaagcattatttcaaatgtgttctttaggctcattaatttactttattcttgaaaagaaacataccagcttgcgaattcggtccaaca

SEQ ID NO: 1903 - DNA, 122 bp, Artificial Sequence
  Synthetic
ttagtaaaatgttgtaaaatttgatatccttttgaaaacgctttctctatgtgtactgaatttttttctgttgtctgcctttgtttcctgtttttaaagatcttgacttctcatgggtaaat

SEQ ID NO: 1904 - DNA, 122 bp, Artificial Sequence
  Synthetic
cttcacccacgtgcgctgcggcttcgttcgccagcatccaagatggcggcagggcggggcccaaggcgcggcgcgaattgtgacgcaggcgtccggcgtgctccgtgcgcaagcgctttcgg

SEQ ID NO: 1905 - DNA, 122 bp, Artificial Sequence
  Synthetic
aaagacttcatctgagaggtgacttggactaggaggggcaagttagaagttttaagggaagatgtgccaggaaggctaacctctcaccataatacataccccccatctaagtcaaaagttgt

SEQ ID NO: 1906 - DNA, 122 bp, Artificial Sequence
  Synthetic
taggtaaaatatctcagtggcaggcccaggaaaaggtgaagtgtcctaggacaggaaaaagatgaaggaaacggaaagggaaactgactcgaatcccaccttatcatgcagagtccaaccaa

SEQ ID NO: 1907 - DNA, 122 bp, Artificial Sequence
  Synthetic
ggttggggggatttttggttatgttaaatgtttgatgtttaaattgttgcatgttgaattcaaactttttaacaagtccttgatgtttcaatttgaaagtgaccaatggggctgaggctgtg

SEQ ID NO: 1908 - DNA, 122 bp, Artificial Sequence
  Synthetic
ttgtgagtggtattaccttttgattagttatagaatgagttacacaactcaaaagctttaggtaatcaaaaattaagtttgttttctttcctgttctagttaccggtttactaaaatagtga

SEQ ID NO: 1909 - DNA, 116 bp, Artificial Sequence
  Synthetic
agatggccaggagccctggctgtctccccatgctcccacccagctcatttggcccccaggtggtgtaaggcagctggcagtcagcccacagctactcacggtctcaggggccccgc

SEQ ID NO: 1910 - DNA, 122 bp, Artificial Sequence
  Synthetic
tctagtaactagttcaatttgtctttattgtggttaaaaaaaacccagaagattgacagttgtaactattttatgtatttacgtattttttttttttagagacagggtctcgctctgtcgcc

SEQ ID NO: 1911 - DNA, 122 bp, Artificial Sequence
  Synthetic
gctgaggtaggccctatggaaaaaggtgaaatgggatcccctgttggtcaggacataataggttatgctgtggaaaacacaagccccaaactcagtggcttcgcacatcaaaaatttatttc

SEQ ID NO: 1912 - DNA, 122 bp, Artificial Sequence
  Synthetic
aattcatagagttctcggagggacagaaaaggctgagcctagactcgtgctggaggccctcttctggggagttgtgagagatgcatatgatgtactcactggtctttgtgagccacgtaaat

SEQ ID NO: 1913 - DNA, 122 bp, Artificial Sequence
  Synthetic
tattaaacctatatcaatattcaaatgtgatttttgaggaaaatatgttaaatttagaaatattttccaacttactgagttttcttattcttacctcagggggatttccctgtgcaatgaag

SEQ ID NO: 1914 - DNA, 122 bp, Artificial Sequence
  Synthetic
gagcagttctttgggcatggatgccgtgctcaaaggccaccacctgcaagaaggctggggcgtccagcctccactgccagcagaagtcagcctccttacctgccgtcgcctgggctcggccc

SEQ ID NO: 1915 - DNA, 122 bp, Artificial Sequence
  Synthetic
gagtctttcgtgaaatttctacacaaaatgcagccaacaactgctttgtcctcaaaaaccccagaagaatattttaagtattatcttaaacacacttacctggattttgatcttgatcgaga

SEQ ID NO: 1916 - DNA, 122 bp, Artificial Sequence
  Synthetic
agttaattctgggaactcctaccaagctcctgctgcctgccaagttctatgcaggtcacgaggctgtcccttctgtgagccatctcttgtccagagcaggtagctgggaccgggcatctgct

SEQ ID NO: 1917 - DNA, 122 bp, Artificial Sequence
  Synthetic
attccctacttgaaccagatcaccaattctctattaactaagtaatcatgcaaattcatctacaacttgatcatacagacactggaacataaaccatacatttacttaacctaggacccatt

SEQ ID NO: 1918 - DNA, 122 bp, Artificial Sequence
  Synthetic
cgctgttggcacggtaggacaaaagaagggaatgcttgcttgtgaggacaatcaaaggctgtccttgtctctgagtccttttgcccttgtctcccacaggtcctggtgcttgatggtcgagg

SEQ ID NO: 1919 - DNA, 122 bp, Artificial Sequence
  Synthetic
ccccttccgaggctaaatcggctgcgttcctctcggaacgcgccgcagaaggggtcctggtgacgagtcccgcgttctctccttgaatccactcgccagcccgccgccctctgccgccgcac

SEQ ID NO: 1920 - DNA, 122 bp, Artificial Sequence
  Synthetic
atgtttcaagaaccatcccccagtatctatcctacaaccaagagccccggcctctagaaagccccaaacccccaggatgcatttcctttgcgtactaaccggctttcccggttttattcccg

SEQ ID NO: 1921 - DNA, 122 bp, Artificial Sequence
  Synthetic
gacgtaaaagacttagctcaatgcctggcatataaacactctatacatggtaactatcatgatttaaaagtttaataggatgggtgcagtggttctcacctgtaatcccagcactttggaaa

SEQ ID NO: 1922 - DNA, 122 bp, Artificial Sequence
  Synthetic
aggctatggagagcccagggctggacaggcctgaggttccgacatacctcatgccaggccacacgcgcaccgtgtcccaccctcagccgaaaaccaagatcaagaccatccaataatttact

SEQ ID NO: 1923 - DNA, 122 bp, Artificial Sequence
  Synthetic
tgttttatcatctgtgactgttccaacagctctttgtctccacagtgcttattattattagcacagtgtctggcatatattaggtattcaaatacttactgaataaaccaaccacgaggagc

SEQ ID NO: 1924 - DNA, 122 bp, Artificial Sequence
  Synthetic
cggcgtccacatgggcagggatgggtgggggagggtgggcagggctgcggcgtgtccaggggccgccgtattaattgactgttcttattgtcactgcagccaccacgcagctggcttgcagc

SEQ ID NO: 1925 - DNA, 122 bp, Artificial Sequence
  Synthetic
gccacatccattagaatatgaagtcccagtcagtacaacaatagttgaactgattgtttctctaagaggatagtgcatctttaacatttaaagacaaacctgctccaatacacgcccacaga

SEQ ID NO: 1926 - DNA, 122 bp, Artificial Sequence
  Synthetic
gcacttaaatgcagattattttggagtttgaaaagggactattaatgaaatctttcttttccctcctttctctttttcccttccccgccactgattcagtgagctggagattggatcacagg

SEQ ID NO: 1927 - DNA, 122 bp, Artificial Sequence
  Synthetic
gaaccagatcaccaattctctattaactaagtaatcatgcaaattcatctacaacttgatcatacagacactggaacataaaccatacatttacttaacctaggacccattcattcttccag

SEQ ID NO: 1928 - DNA, 122 bp, Artificial Sequence
  Synthetic
tccatcacttgagttgtatgtcttccaaatgaatttttccatgtttgcgcagcaaggtaatgacacgacctcaactttatcttttttgtgtatcctcaggaatgggtagctctcgagaatct

SEQ ID NO: 1929 - DNA, 122 bp, Artificial Sequence
  Synthetic
gccgcagagctccccacggaggggtcccagcctggagcccgggcaccgcccatctctaacccgccgctagccccggaccctcccgcgcctgctccgcaccacggagccgggcctccagagca

SEQ ID NO: 1930 - DNA, 122 bp, Artificial Sequence
  Synthetic
caggggtgggagtgattaaaatccagggccaaaatatagtacagatcttttatcccaatggttacaaattaaaaggggcttctcaaatccagacctcaccctttggactggccatttgctcg

SEQ ID NO: 1931 - DNA, 122 bp, Artificial Sequence
  Synthetic
aaaacagaactttctgttaaagaaaacatagttaacatttttacactcagctctgtaaaaaatttaaattaaaaaagaaaaaacatctttgttttatacctttatttaacaaggacaaattt

SEQ ID NO: 1932 - DNA, 122 bp, Artificial Sequence
  Synthetic
gagtctcgtcgaccgtattcccacccatccccaaatttgttgtgaacttcaacaatactgtcctcacaagaccttaaccctcacattaagaccaatcacctgaaaaaaagcaccatgccgta

SEQ ID NO: 1933 - DNA, 122 bp, Artificial Sequence
  Synthetic
cctcccatgctacagacggcatgctaacagttgggtggggggtcctgtaaatctcaccaatgggttctgcactccttgaccctgctcttaagcactgaccttcaggagcttgaagcgagaag

SEQ ID NO: 1934 - DNA, 122 bp, Artificial Sequence; identical to SEQ ID NO: 1931
  Synthetic

SEQ ID NO: 1935 - DNA, 122 bp, Artificial Sequence; identical to SEQ ID NO: 1932
  Synthetic

SEQ ID NO: 1936 - DNA, 122 bp, Artificial Sequence
  Synthetic
ttttccttttgtggatgttttaattttaatcaaccatcttttccccccttcctgctcctcctcctcctcatcctctttctgctcctcctccttgaaaagagccagaactgggaactacaccc

SEQ ID NO: 1937 - DNA, 122 bp, Artificial Sequence
  Synthetic
cctcctaaatagggagacccaagattctgtagcttctggcccaatccctcatggccccagagcactctgggcctcctgaccctttgtctccctagacagcacccaagaaaacctcatttggc

SEQ ID NO: 1938 - DNA, 122 bp, Artificial Sequence
  Synthetic
gtctttttacacagcctcagttaatcagctctgcccccatctccattacgtctgaataatttgcccagtaggaaaataggccaatagtcaacaacataccctctgatatacagccttgcagg

SEQ ID NO: 1939 - DNA, 122 bp, Artificial Sequence
  Synthetic
gtcttgccgttcatgttgttgccatctcgtatttaaatgtaaatgcatgtccaagtttcaagtatattcacataggactttctctcctgccctcacaagggaaaaagaccttgatgaagttc

SEQ ID NO: 1940 - DNA, 122 bp, Artificial Sequence
  Synthetic
gattcctccctagttcccactcagctaactggctgagttttagaaccagggtcacttatctgatcccagaatcctcaacaccatctgtggccaccttacccgaacatgtggctgcaatttcc

SEQ ID NO: 1941 - DNA, 122 bp, Artificial Sequence
  Synthetic
tttaccatgctggccaggctggtctcgaactcctgacctcaagtgatccacctgcctcagcctcccaaagtgctgggtttacaagcgtgagccacacacctggcctagtgggtcccccagtc

SEQ ID NO: 1942 - DNA, 122 bp, Artificial Sequence
  Synthetic
tggcaaagcagagctgtggggacctgtaggttcagaagagggaacagagtagacaggctgcatagagtgaacagcagaagcgccagtggtgttacttacgtgcgcggggaagggctggagtc

SEQ ID NO: 1943 - DNA, 122 bp, Artificial Sequence
  Synthetic
aaggggcgcagcgataccggtgcgcggcgctggcgtcgggcgcgtgacgtctttcctgcgcgccacctagcgtctctatcgcgccagttcctcagcctcagtgctatgaaggtgacagcgtg

SEQ ID NO: 1944 - DNA, 122 bp, Artificial Sequence
  Synthetic
aaccaagacactaaagccaagagttttgaacaaatgcttgtcatctcctgcaaaagtctgtatcaaggactacagtgctctgtctaggatatttctcacctggaacttctccagctcactgg

SEQ ID NO: 1945 - DNA, 122 bp, Artificial Sequence
  Synthetic
tttgagtgaaccctggtttagttatagtggctttatccctaaataaattgaattgtactttgttatatgatgtaaaaaaagactttttaaaaaatacaggagtcgatagcagcagttggtga

SEQ ID NO: 1946 - DNA, 122 bp, Artificial Sequence
  Synthetic
gtgagagtgtttgcatgtgattgaacatggagtaggaagctgtggttaagatttaaactgggataacatcacactctgtcctctactttaatgaggcaggattgcagatgttatgggctgat

SEQ ID NO: 1947 - DNA, 122 bp, Artificial Sequence
  Synthetic
cgcggccggacggcccagtctggagggttcggggcggaggcccgggggggtgcgcgcgcccggggtccggcctctcactcgctcccctctcgtccgcagccgcagggccgtaggcagccatg

SEQ ID NO: 1948 - DNA, 122 bp, Artificial Sequence
  Synthetic
ggccgatgccagggcggggggcgctgtctgcaaccgtcgcggagcgctggcctggcggccttaggcaagggtgaccgccgctgcgcttctctccaccagacgtaaggcccggcaagccaagg

SEQ ID NO: 1949 - DNA, 122 bp, Artificial Sequence
  Synthetic
gacaatgagttatacctgtttcttccacttcctttaaatggcaaggaagctgaaagtagaacagaacatttgtttttatttaccaacaactacacttaccttataaacagaactgccaccaa

SEQ ID NO: 1950 - DNA, 122 bp, Artificial Sequence
  Synthetic
cagtgaacccaatttgtagtctgaaaagacatgttattttctatagtcttaagcaggaaatccaaagtgcttcagactaattaataaccttatacttactctggcagaagtttatatttctc

SEQ ID NO: 1951 - DNA, 122 bp, Artificial Sequence
  Synthetic
ccctgatcatcaatgcctaaatataaggtggctgctcagaatttattaattttcacggtaaatccaaaggtgtcctaagaaagtcatcactgcagctaccttttttgagtggaacatgagga

SEQ ID NO: 1952 - DNA, 122 bp, Artificial Sequence
  Synthetic
cccttaatcctgcctcatagaagcaattcgtcttgccaggagatgatgatggcatcacggtgtggtgtcccatccctgtgccaccctggctaacgttacctgggctcggtgctccccgacgg

SEQ ID NO: 1953 - DNA, 122 bp, Artificial Sequence
  Synthetic
caccagcatctcacttgcttctttttctctgcactttgagttgccaaatcctgttggattgcttttttgatctcaatcccctaacaccttttcttccagaagagcttaaagcagcgcctggg

SEQ ID NO: 1954 - DNA, 122 bp, Artificial Sequence
  Synthetic
ccaagctccactggaaggattaactatagaagttacagtgctttacaaattcttccctcctcaccaagtgccaaccaaaactactacgccaggacacacgttttagaactttccctagatgt

SEQ ID NO: 1955 - DNA, 122 bp, Artificial Sequence; identical to SEQ ID NO: 1888
  Synthetic

SEQ ID NO: 1956 - DNA, 113 bp, Artificial Sequence
  Synthetic
tcttgtgacctgttttcaagttttctagtgctttcttctgtcacatctcatctaattgagtgaccgcaactcctaagtatattgtgactttattttcaggataagggagatct

SEQ ID NO: 1957 - DNA, 122 bp, Artificial Sequence
  Synthetic
agcgattctcctgcctcagcctcccgagtagctgggattacaggcgcgcgccaccacacccatctaacttttatatttttagtagagatggagtcttaccatgttggccaggctggtctcga

SEQ ID NO: 1958 - DNA, 114 bp, Artificial Sequence
  Synthetic
acatttcccttaaattatatatagttaatataagtttttattgaaatcataacttttcatttatatttgaataatcatttcccccaaagacatatttaccttcagccagtgctg

SEQ ID NO: 1959 - DNA, 122 bp, Artificial Sequence
  Synthetic
aatatgaaatatagaattctgaagtctagaaaacaagagattacaaagaggtgggacagtaagtttcagttaactagaaaatacataaatgcgctttacctctcgtatttcgtggccagctc

SEQ ID NO: 1960 - DNA, 122 bp, Artificial Sequence
  Synthetic
tatttttttttttactacctaaaaaaagatttgttaaaagctgaattacaacttagcattacataatataaaacactgtaatgtgtatttaaaataaaccttgcaagtttgcaggtcgaccc

SEQ ID NO: 1961 - DNA, 122 bp, Artificial Sequence
  Synthetic
ttcaataattatatctgttcacaggtaagtttttcccctacatcatgatgaaagctgaggaataaagatgaccgagacagtaaatttccccacacttactaaaatactttgtaaagcagttc

SEQ ID NO: 1962 - DNA, 122 bp, Artificial Sequence
  Synthetic
ccctgaaaatcatttatgaaaaaaatatagagcacacagatatctcggtttagaacatgaagacttgcccaaaataacaccaggattctaatcacttaccttagcagtggttttctttatag

SEQ ID NO: 1963 - DNA, 122 bp, Artificial Sequence; identical to SEQ ID NO: 1921
  Synthetic

SEQ ID NO: 1964 - DNA, 122 bp, Artificial Sequence
  Synthetic
gaggtggaggttgcagtgagctgagatcacgccactgcactccagcctggtgacagagcaagactccgtctccaaaaaaaaaaagaaactgaggtgtacctggctcctttccacatcttggt

SEQ ID NO: 1965 - DNA, 122 bp, Artificial Sequence
  Synthetic
gaactgaaagcccaagcgcggcggcgtccagccgggcagccattttccgaagctgctctcttggtaaccccgcccgggcgcgtacgcacgaacggaggcggggcttaccgcgagggcctcgc

SEQ ID NO: 1966 - DNA, 122 bp, Artificial Sequence
  Synthetic
ctgttatcaccactcccacccccacggccttcaccctcggacggtgtgtcccgtccccggcgaggccccgccccctgcgaggccccgccccctcctcacctcgtacttcttcatacagctct

SEQ ID NO: 1967 - DNA, 122 bp, Artificial Sequence
  Synthetic
gtatccacagctcaagcaacaaggtcaggaaaagaaaatctctttggtacaatggtcaaacaaccccgactatctaaagatgaaataataatgccatacctgatcctggtgatcaaagaagg

SEQ ID NO: 1968 - DNA, 122 bp, Artificial Sequence
  Synthetic
gataatagtatctcacagggaaacattttctttcattccagtggccttagtcatctctgaagaaatacttacttgatttttttttttccaatcaaacagagcagtatagctgtgactatgga

SEQ ID NO: 1969 - DNA, 122 bp, Artificial Sequence
  Synthetic
ccgcccggccccctcctcccaccaccactgcttcccctgcctcacgtcccgccaccaacgcgcccttcagctgctcccttgtcctctacccccatgtacctgtttcctgcgctgccacgtgc

SEQ ID NO: 1970 - DNA, 122 bp, Artificial Sequence
  Synthetic
gagaggtggagcttagggtctcagagctcacctagcagggcgcccctcctgcctgtcccacttgggttccggaagaggtgcccttgccttgtattttagacatggggcgccggctgctgggg

SEQ ID NO: 1971 - DNA, 122 bp, Artificial Sequence
  Synthetic
aaggtagatctaatttagtgttacagaatctttattttgaaattgttgtacttgtgagctggcaacttgtactgacttgattttttttcttccacttagcatggaggatgaaaaggaagata

SEQ ID NO: 1972 - DNA, 122 bp, Artificial Sequence
  Synthetic
gcaggccacaagaaaagttgcaggtggtcactggggtagacatgctgtacaacccttccctggccctgacccttggacctggttccatgtccccaccaggaagtggccatgcgcaagctggt

SEQ ID NO: 1973 - DNA, 116 bp, Artificial Sequence
  Synthetic
caacattatctctatgatattgatctctatttgcttgacggctgcccttcttaagatcatgaattacaatatattcaaatttgttttttctgaaacaaggaagaacagatgaggca

SEQ ID NO: 1974 - DNA, 122 bp, Artificial Sequence
  Synthetic
gggccccaagggtggggacctgggcacagcctcgctatcggcagccagaggggtcccctatggcccccgccactgggaccttttgtttcttcaatccagggatgcaccagacacctatcact

SEQ ID NO: 1975 - DNA, 122 bp, Artificial Sequence
  Synthetic
tgctcttcgacatgagcatcagggccctgtggagggcgcgaggtcaggggccacaggccgcagatcaagggtcaggtgaggggcaagtgttgggctgacctcatggggtgcaggtggaacag

SEQ ID NO: 1976 - DNA, 122 bp, Artificial Sequence
  Synthetic
gtggcagttctcgtagactgtgttggtttaacaagcgtccaacccttttgtcttgttgttttttgtctttcctgctccctgtccccttgtttcccacaggctgtgcgtttgtcacattttct

SEQ ID NO: 1977 - DNA, 122 bp, Artificial Sequence
  Synthetic
ttggcgatttagaacagataaggatgaatgttgtaatggtttttctattccttctggggttgtctgtcattctactcacgatgatctaggtaatggcctaagactggggccctttctcttat

SEQ ID NO: 1978 - DNA, 122 bp, Artificial Sequence
  Synthetic
tctgccttatctttagtaattgtgtttatgttggctatctggctattgcccttgcgtgacagacacaagtgacagtgctgatggcccttctgattgcagatgtcccaggagagaggagtaca

SEQ ID NO: 1979 - DNA, 122 bp, Artificial Sequence
  Synthetic
gcccccagccctgactctgactcctcagagcacccgagtaagcaagtcttacacaaaaacacgaacgagaacattcgaggaaattctggaatgactcaccacgtagatctgtgacaggactg

SEQ ID NO: 1980 - DNA, 122 bp, Artificial Sequence
  Synthetic
ggaccgaaacacacagaggcattgcggggctcagagaagaacagtgtagaaacccgcgctgtgtgaagcgaggttgggcgcaagagaagcaggcatgacctggccaacggggaggccggaag

SEQ ID NO: 1981 - DNA, 122 bp, Artificial Sequence
  Synthetic
tcaactacaagaaaagaaatggtgtattgtcatttttgccaaagcaccccaaaatgaaatactttcttactcaatctaggttcttttttttcattctagtcccttaagctcctaggattttt

SEQ ID NO: 1982 - DNA, 123 bp, Artificial Sequence
  Synthetic
cgaagcagaagaatccaaggaaggtaggattctggtttctcctgggggccggccaagttctgcggaggaatttggaggaaggcagtggtagaagaggatgggagttttaaagtgagcggtggg

SEQ ID NO: 1983 - DNA, 123 bp, Artificial Sequence
  Synthetic
gagctagagccagagcggctgccctgtgtcaagggagagggtcagtgagtgctgctccctggctggggcggggcggggcgggtccctggctagctgtggggtggagagctgcctcacctgccg

SEQ ID NO: 1984 - DNA, 123 bp, Artificial Sequence
  Synthetic
ggccgcggaagtagtgaaggagcctggaagggatgggtgggtgtgagcccaacctgacaccagcccccagaggcctctgctgaagagccactgctgggaatcagctctgagctgcccacaggc

SEQ ID NO: 1985 - DNA, 123 bp, Artificial Sequence
  Synthetic
gcagacccatgggagatctcctcctgaaccccagcaacgggggtggggtgaggtagggtgggtaggagaggttgatccgaatcccagggtcccacgccatcgtagatttcgtatgaaaagaaa

SEQ ID NO: 1986 - DNA, 123 bp, Artificial Sequence
  Synthetic
aatttgtcttggtcccaggacaactaggaagaattaggtgaaggatggaggagttctctaaaggaagggggttgggggaggtcaagggaagacctccatattatttttctcttcctcatacat

SEQ ID NO: 1987 - DNA, 123 bp, Artificial Sequence
  Synthetic
accaattaaaaccaacttttagactgcaatagagaataaacggaggcaaaaatcaatgcaggaaacacaaaacaacacgcacaggccacactgtacattacgaaggcgagtctgaaaccacca

SEQ ID NO: 1988 - DNA, 123 bp, Artificial Sequence
  Synthetic
tgctgcgctgaaaccacacacacctgcagatgagaaaaggcaacggccaggtcagactcctgtttatcacaccaagtttttagctacaagaatgaccagctaccatattaggccctcaaatat

SEQ ID NO: 1989 - DNA, 123 bp, Artificial Sequence
  Synthetic
gggcctcaccaatccagtcaaccctttggaagaaaatacagcctgtttcaatccaatgctggatcttccaggcgtaaaatgactcgacgcatccgcagggcacaactcaaccgtaaccctcta

SEQ ID NO: 1990 - DNA, 123 bp, Artificial Sequence
  Synthetic
atcatgtgcttcagaagaaagaggtacgagtgagcagttgcctttgattagtgcctgtttccctttcccgactgcatggcacggagcagctggacctgtgggtcccgcaccacttccccttct

SEQ ID NO: 1991 - DNA, 123 bp, Artificial Sequence
  Synthetic
aggcaggcaaagatacactgaacctttataaataaaatagaggggccacaattgttcagtttgtatgaaataaaaatatgggaagcaattcaaaagcaactcaatatacaaagaaagctaaaa

SEQ ID NO: 1992 - DNA, 123 bp, Artificial Sequence
  Synthetic
gaccctctgtctggtttcgtctcctgaaattcatttgtggttttaaataagacaatattatcacattaaccaccaaaaaataactagtataacaattcacctggatgatttgcagactatcat

SEQ ID NO: 1993 - DNA, 123 bp, Artificial Sequence
  Synthetic
accttctcccgtagaaattgctcctattttaaaacagaaaaaatgcaaaactagggaagagaaccctagatattcactagggaaggtaccctaggaatagagcttaggttattatcaaatact

SEQ ID NO: 1994 - DNA, 106 bp, Artificial Sequence
  Synthetic
tagccactttacgttggcaaaaaaagggggggaaaaagtagacattaatgctaggtaagttatatccgataggacaggtttacatttacagttactcaattcatgt

SEQ ID NO: 1995 - DNA, 123 bp, Artificial Sequence
  Synthetic
acctgatagtggaagaaaagtaggttagttctccttcttcctattgcctgtccttatcactcatctctttcttctatatggatatttgtatattttctcattcatgaaaatctgtaaacctag

SEQ ID NO: 1996 - DNA, 123 bp, Artificial Sequence
  Synthetic
tcaagaccagcctggccaacatggtaaaatcctgtctctactaaaaatataaaactagctgggcatggtggcctacacctgtaatcccagctactctggaggctgaggcaggggaatcacttg

SEQ ID NO: 1997 - DNA, 123 bp, Artificial Sequence
  Synthetic
agatgttaaaaaatggcgtgattctgcaacggtaagaatattgattgcttttttaaaagatgccttgtaggcagagacaagtcatttactccatttatgccttactcagtactggcaccgaat

SEQ ID NO: 1998 - DNA, 123 bp, Artificial Sequence
  Synthetic
agtaactgtttcttcaaacgtgggtgagaattaagctgtaaatgctaattttaatgtaattttactttttttttaccccttccctctttttttttcttctgtccttttgtgtgtgtccttccc

SEQ ID NO: 1999 - DNA, 123 bp, Artificial Sequence
  Synthetic
tatctcatccacagacaaacttggtgagggtctgagagcagtcagctgcgttgcttgagctcctctcgctgtgccacgacctgtggtagccaggatgtccaggcaggagggaaaggctcttaa

SEQ ID NO: 2000 - DNA, 123 bp, Artificial Sequence
  Synthetic
gtaggtgccagtgcgaacttcatctggagaacatgatgggggaggagcaggggggaggaggaggagggacgaggagcggggagggagagtgggtgagtgaccagcggagccccccaggacaga

SEQ ID NO: 2001 - DNA, 123 bp, Artificial Sequence
  Synthetic
tatgccctacatcttggaatgaggtgacttttttttttttttttttgatattttggccaattattgatcagtacttggaggtctcctgggataccatttgaggtcctgtaacttgagagaaag

SEQ ID NO: 2002 - DNA, 123 bp, Artificial Sequence
  Synthetic
ggttggtggcggcggtcgtgcgggttcgcgccgggccgagagcgggttgggggctgcgggaggctgcaggggcctgggcggcagaagaggcggccctgagctggctcatgcgggccagtctcg

SEQ ID NO: 2003 - DNA, 123 bp, Artificial Sequence
  Synthetic
tgtaaaatttgtctctcgcgtccctgtggaggaaattgaaaacagacacagaaagtcttattaaaccttttaaccattaattcaattgacacagtgttgttaatgttcaactcatacttcaaa

SEQ ID NO: 2004 - DNA, 123 bp, Artificial Sequence
  Synthetic
cacggatctcaggaaggacatccctagacacagacagataagttgactcttagagccaccctctctccaaactcactttccatcctaccagttaactccctctcatggaagaatttattttct

SEQ ID NO: 2005 - DNA, 123 bp, Artificial Sequence
  Synthetic
caccaaaaacctcacactgtgatgtaagtacttagtgtaaaactagtaaacatttttgtaaaatgtagaaatgcatgtaatcagttaagttttatattttacaatgttctgtaaaataaaact

SEQ ID NO: 2006 - DNA, 123 bp, Artificial Sequence
  Synthetic
ggattactttggctattttccaggtactggggaaattccaaatgcattacaagttattgggatggctattaattattcatttcctaaaatatgttgactgaagacttgagatttggttatata

SEQ ID NO: 2007 - DNA, 115 bp, Artificial Sequence
  Synthetic
ccacggcctctggctctgtttgatagaggatcagggttatggaagaagtcccaggtctagagccaggacagcatgtgcagtgatgtgtggggttggggtgtgtgtatggcatgta

SEQ ID NO: 2008 - DNA, 123 bp, Artificial Sequence
  Synthetic
ccgaagaactgggacttttagaggcgagctaccaagcccatcctgtaaccattttaaaatgtacaattcagtggcattaagtacattcagaatgcagtgtactgttgtggagtcttcccgcta

SEQ ID NO: 2009 - DNA, 123 bp, Artificial Sequence
  Synthetic
cgcaggccatcatccgaggcaatctgtccaaagacaaggtggggaagagcaggaactaggcctaaccatcacccactggactggtgggaagaggctacaagcgggcaaccctctggtacccaa

SEQ ID NO: 2010 - DNA, 123 bp, Artificial Sequence
  Synthetic
gagggtagggtcccccctttcacctcaaaaacaaaacaatagaacaaatattactgagagctatgaatacattttgttattgcctactatctaaagtagcaggaaaaattggttgctatttac

SEQ ID NO: 2011 - DNA, 123 bp, Artificial Sequence
  Synthetic
ttcaaatagtaaccacattactggtaagtaaacggtggggttattgggtttagcaagtggggaagtaaggggtgaacaaaacacgagagatggtggctacacccctactaagactgccttacc

SEQ ID NO: 2012 - DNA, 123 bp, Artificial Sequence
  Synthetic
agtccataagcttcacaccaaagctacacagagagaagaaacagtcaacacaccatgcgagcagactactgagacagaagcccatcggtccacatgtgttaaaaccacacatggggatagcca

SEQ ID NO: 2013 - DNA, 123 bp, Artificial Sequence
  Synthetic
tcaatttcttcacgaacattaaccttaatggaaaaagaacatttagtatatttaagcacgtggggattataaaactctgctggagttcagaatgttatctaccaaatggaaaagccagcaggt

SEQ ID NO: 2014 - DNA, 123 bp, Artificial Sequence
  Synthetic
gaggaccatccagtgtgcaaaaggtacggcggccgggctgcatgggctgcgtgggctcctggctcccgaagtgggtgggagagaagagctggcacgtgctggttttgaaggtgtgatcggtgt

SEQ ID NO: 2015 - DNA, 123 bp, Artificial Sequence; identical to SEQ ID NO: 2013
  Synthetic

SEQ ID NO: 2016 - DNA, 123 bp, Artificial Sequence
  Synthetic
gttggggactccaggctcaagaagtaattatgtattaggctagtttttcatttaaacaggaacttagctctggcaagtactgcgctgtgtctggagggtgactgcataggcagtggtgggacc

SEQ ID NO: 2017 - DNA, 123 bp, Artificial Sequence
  Synthetic
cacccgcccctctcctgtgccaggtgagcgcccctcttcacgtgcggggaccagggaccgtggagagggatcttgggggcagtggcgggttgggcgtccgcgtggaggcctcccccatcccat

SEQ ID NO: 2018 - DNA, 123 bp, Artificial Sequence
  Synthetic
gcgtcccaggtcgtcgcacgcacctggaagattccgaaatcctcctgctgtgcatcctgccgtaggccgtgcttccaagggatgcggaagcgcgtgcggctcttgttcacccaggccacgccc

SEQ ID NO: 2019 - DNA, 123 bp, Artificial Sequence
  Synthetic
ctgaacactgtaaatgtccaaatctggaggaacagaggaaggtaaacatttgattctcaagtggaagttcaaagcattacattctttctggaggacagtttggaaacatgtacacaaagtaat

SEQ ID NO: 2020 - DNA, 123 bp, Artificial Sequence
  Synthetic
gtgtagaaggcatcctccactccctgggaaaggagggatgggatcaggagggaccggcctgtggccgcctgcctgggtgaggggctccctgctgtgggatcaagccttgcctggcccgaagct

SEQ ID NO: 2021 - DNA, 123 bp, Artificial Sequence
  Synthetic
gaagagtccaatggctgtttattctgcaagaaagaggtgataagtacctgtaacttactgacctgctggaagtagacaaagaagctagaaaattagattgtgttgacttctaattcctattgt

SEQ ID NO: 2022 - DNA, 123 bp, Artificial Sequence
  Synthetic
ggacacccgcaaggccggcatcggtaaatggcacctttttctcttcctctggttgttatttgggggggagcgggctggggcggggcagggtattacggttggttgaggacagccccctaggcc

SEQ ID NO: 2023 - DNA, 123 bp, Artificial Sequence
  Synthetic
ttttatcaaacaggagaccgcagctttaaagggggaaaatgcagacgttggataaaaacagcaagaaatagtcattttcattaataggtctcaaacagtttacgaaacagccattattatcta

SEQ ID NO: 2024 - DNA, 98 bp, Artificial Sequence
  Synthetic
ataattcaagcttttcatgtagtcatgtagatcactagactccttggtgtactgacgtagcaatttaaaagcagatcatgtgtagtacatctagaagt

SEQ ID NO: 2025 - DNA, 123 bp, Artificial Sequence; identical to SEQ ID NO: 2013
  Synthetic

SEQ ID NO: 2026 - DNA, 123 bp, Artificial Sequence
  Synthetic
ttcccgggatgacttcaattctggtatcagtatttaaagtatcaccacttaatttttcctaggagccttgctgctgttctctgtttcttacgagtagcccgcctggccggactacttatttag

SEQ ID NO: 2027 - DNA, 123 bp, Artificial Sequence
  Synthetic
ccagcagccggcacaggccctccctgcggggcgggaccgtcaggggggtgggtgctacgctggggcccacccaaccccgcgcgggacccaccggaagctgtggctgcaccaggcccggctcag

SEQ ID NO: 2028 - DNA, 123 bp, Artificial Sequence
  Synthetic
tctgtattgttgaactctgggtcctaagagatgaggggttggcaaaggtaggtctgcaaacttcattttgttcattctatttcactctagtttattagaatccagttaaatacttggtaaaac

SEQ ID NO: 2029 - DNA, 123 bp, Artificial Sequence
  Synthetic
gcagtgctaaacttctacctacacttttaggaaagaggtgaaggcattaacaaaaattttttttgagacttcaaatagcaaactctcacctaagttttggataaaaattaatcaccccgcgaa

SEQ ID NO: 2030 - DNA, 123 bp, Artificial Sequence
  Synthetic
tttcatttaggtgtttgaagaatctgaaaagcacaggtattaatatgaccatactaacttgatacattaagttcaaaatttaagccatgttaaagaaacataaaaatacttttagataccatc

SEQ ID NO: 2031 - DNA, 123 bp, Artificial Sequence
  Synthetic
ttattcatatataattccggtacctaggggcaaaaaggactggatgctgttaaataattagctgcatgccaactttgggtcccaaagccagagcctgtcgtccctgctccatcataacgccgg

SEQ ID NO: 2032 - DNA, 123 bp, Artificial Sequence
  Synthetic
tgactgcagtgctaaacttctacctacacttttaggaaagaggtgaaggcattaacaaaaattttttttgagacttcaaatagcaaactctcacctaagttttggataaaaattaatcacccc

SEQ ID NO: 2033 - DNA, 123 bp, Artificial Sequence
  Synthetic
aaggatcacaaaaacagaactttctgttaaagaaaacatagttaacatttttacactcagctctgtaaaaaatttaaattaaaaaagaaaaaacatctttgttttatacctttatttaacaag

SEQ ID NO: 2034 - DNA, 123 bp, Artificial Sequence
  Synthetic
ctctgtttgaccaagcggccaaggtaaagatcctggaggtgatgcctgcggctttcctttcctcttctgccccactcgtggttctgttctgtcttcgctgtcccctctctcgaattgctctgt

SEQ ID NO: 2035 - DNA, 123 bp, Artificial Sequence
  Synthetic
atgaataagccctcagatggcaggtgtgtgtgtgggggcggggcagatgtggctgtgggagagaccttgggggtggctggggtttccctgggcctttgggctctttccttagaaacttagcat

SEQ ID NO: 2036 - DNA, 123 bp, Artificial Sequence
  Synthetic
ggcgagctgtttgcctgcagtatctggagaaattaaagacggacggacacaagaaaattaaaaagattacttgtgatcctgcaggtttcaagaaggactacctgaaaaagctcgagtatacct

SEQ ID NO: 2037 - DNA, 123 bp, Artificial Sequence
  Synthetic
aacagatgaccaaactgaaatctgtaagcaggcgggtaacagctgcagcatagctaaccctaataaccatttataacgtatttgtagatatattaaacattaaaggctgtttttctggaggaa

SEQ ID NO: 2038 - DNA, 123 bp, Artificial Sequence
  Synthetic
gaaggctgagtcagtgccattagctacaacgggagcagacaacatcaatggagttaattcatgcagggtgtacaagtgaccccttggagctgtgtcagtcaggtgaatgtacaatactggtgg

SEQ ID NO: 2039 - DNA, 123 bp, Artificial Sequence
  Synthetic
ccctcttctccaggcaagaaaagctgagaacagaaaggtttagtgctgacttgggtgcttggggtgcgatgtgtggggagagggggagtcagcctctctcctcaagcacccactctggggtga

SEQ ID NO: 2040 - DNA, 123 bp, Artificial Sequence
  Synthetic
taattagcatcttttccaagcaactgttaaatgtgaaagatcagatacaaatcatgctactttgtcaactttatgtatattaaaaactttacccaactttgaaatataatcaatacatctttg

SEQ ID NO: 2041 - DNA, 123 bp, Artificial Sequence
  Synthetic
tcggcctggcggaagttttgcaggttgtgaagacccctagtctttcattctctccttgtcacagccttgtagggcgtgaaggggtcattgccccatttagggatgcgcacctcctgatttccc

SEQ ID NO: 2042 - DNA, 123 bp, Artificial Sequence
  Synthetic
ctgctgggcctcgggccgctcacctgcggaaggggccgcgtaagaggggaaggtggtggggcgagcgcctgccaccaggggcttcccacctgccgccgaggacgctcctgccccgggctggaa

SEQ ID NO: 2043 - DNA, 123 bp, Artificial Sequence
  Synthetic
ctgtttgaataaagagcgagtcggtatttatatttgtttttcttttgtcatgattatttgatttttaagttgctccagctaaggcatttttttgtattagtatttctattagggaacctttct

SEQ ID NO: 2044 - DNA, 123 bp, Artificial Sequence
  Synthetic
gatatccagaagttcatggtgaggtaattacatttaatcaagatctcaaggttttttctttcatttgttgttcaccattgatcaagcttttgccctttgccgtgagaacaaaatattgaactg

SEQ ID NO: 2045 - DNA, 123 bp, Artificial Sequence
  Synthetic
cagccggcccgtaagatccgcaggtgagccctgcgctcggggctgcccctggggctcgtgcccgcggctgcgccttggcttgcgggtggccgatgccagggcggggggcgctgtctgcaaccg

SEQ ID NO: 2046 - DNA, 123 bp, Artificial Sequence
  Synthetic
ccacggttcggtaccacacgaaggtgcgcgccggccgcggcttcagcctggaggagctcagggtgagtactggcagcgctgcggtgtcaggaaggccccgaagtcccctctgttggcctcagt

SEQ ID NO: 2047 - DNA, 123 bp, Artificial Sequence
  Synthetic
aatgagctccttgtggaggttccctaaggttaaaaaaagaattccacaaaatgtttgtaaaatccatccatactagtcaaataatctgactaagatgcagtgactatagaactaaaatcatca

SEQ ID NO: 2048 - DNA, 123 bp, Artificial Sequence
  Synthetic
tggcctgggtgattcatggcttcctttgaaataaaacaacatcagttttcttaatgtgtgtcaaaagacaaagaaactctaagatttatgtttagttaagtttatactaggtattaaaaatat

SEQ ID NO: 2049 - DNA, 123 bp, Artificial Sequence
  Synthetic
attggaacctcttgatttgcatgctagaaaataaaacgttttggttaatttttggtatcttatgccaagccccaagtaggaaatgggtatctacctcctgtccacttacatttcgtggggttc

SEQ ID NO: 2050 - DNA, 123 bp, Artificial Sequence
  Synthetic
tccgccaacagcagctctggatgctgggaaagggaagagggcagtgacaaagggaaaaggaaagggaggagaaagggaaggagggaaaggacatcagaacatgagcaccggggaaagaacatc

SEQ ID NO: 2051 - DNA, 123 bp, Artificial Sequence
  Synthetic
taggggcgggatgtcactccgaggtcagtgctgtgtaccctgataattgtcgggccctactcccttcccttttctcttgggctgcttatggacacgtttgtttaacatctttaagcctgaatt

SEQ ID NO: 2052 - DNA, 123 bp, Artificial Sequence; identical to SEQ ID NO: 1985
  Synthetic

SEQ ID NO: 2053 - DNA, 123 bp, Artificial Sequence; identical to SEQ ID NO: 1986
  Synthetic

SEQ ID NO: 2054 - DNA, 123 bp, Artificial Sequence
  Synthetic
gaaggcatctcgaaagttgcaaggtgatccagatttgccgatgtcttttactttggccatagtggagtctgattctacaatagtctattataaacttactgatggatttatgctgccagaccc

SEQ ID NO: 2055 - DNA, 123 bp, Artificial Sequence
  Synthetic
gcccggccagagaccactgtcatcttaagacagaacggggaaaacgtctaaggacgaaatcagcctctctgaatcgaggatgcttatatgctgcttttcccataggcaactctaactctaaac

SEQ ID NO: 2056 - DNA, 123 bp, Artificial Sequence
  Synthetic
tgattctgtccttgtccttctatctgtttaaggaaagaaaaaaaggaagaaagtctaaaacattattatactttaaaacaagtttttattacagttaactttaaagtttacgaatgccatcat

SEQ ID NO: 2057 - DNA, 123 bp, Artificial Sequence
  Synthetic
ctcagactctgtaggctgggcatctaaacagcaggaaagcacaagaaaatttacagtgacatgaattttttaaaatacatgtgtaactctaagcaattaacaacccaaatttccaaagatgag

SEQ ID NO: 2058 - DNA, 123 bp, Artificial Sequence
  Synthetic
atcaccgtctcaaattttctgccctttaaagaataaggtgaagctaggtgtagatgactcgaggggatctggcctcttatgctgatcacctcaaggtctaggaggatcttaattgtcggattt

SEQ ID NO: 2059 - DNA, 123 bp, Artificial Sequence
  Synthetic
aaattagtttcaactgcattctcctttaaaaaaaaaacatagtgaaagtcagttaacaagtttcttaatgccaaagcaatcattctatctgcataattttctaagaagctgaacaaaattcca

SEQ ID NO: 2060 - DNA, 123 bp, Artificial Sequence
  Synthetic
gatagtctaggtctaggagctgactgagagtagaaaaaacaacattccccttcaatacactgttgaagtggggctgacaatttgcacacctagtttatcacgtgccacaggatgctgttattg

SEQ ID NO: 2061 - DNA, 123 bp, Artificial Sequence
  Synthetic
aacctggtgaaaccccatctctactaaaaatacaaaaattagcctggtgtggtggcgtgcacctgtaatcccagctactagggaggctgagatgggaggatcgcttgaacctgggaggtggag

SEQ ID NO: 2062 - DNA, 123 bp, Artificial Sequence
  Synthetic
agcacccacaggctaaactgaacctagaatgaaatataagtggagagagtatcattgaggataaaatttcattgtattactacttataatagggccggggactggtgtcatgaacacattcag

SEQ ID NO: 2063 - DNA, 123 bp, Artificial Sequence
  Synthetic
ccatctaattggctttggtctaggtacttctgattggcttcccccgggcggtgggaggcgcggttttggggattgttcatcatggattggtgaatttgggctccttctcgaggtggtggccca

SEQ ID NO: 2064 - DNA, 123 bp, Artificial Sequence
  Synthetic
gacagggacaggacgagcaggagctgtgaagggaccgacggacagatggacggacagatggggggacgacaggcagagagaggacgcacagacgacggacaacggacggacagacaggagaga

SEQ ID NO: 2065 - DNA, 123 bp, Artificial Sequence
  Synthetic
ccaggcctgaccaacactgggatctataaacaacattttacaaacatttacatattttaagttaccattggaacacaagtctaccttagagtcactttggtagaagcctcaatttataatgaa

SEQ ID NO: 2066 - DNA, 123 bp, Artificial Sequence
  Synthetic
gtggaaacctaactgtccaggaggtaagtttatgaccagtaacatgagttttatattaaaatgcatggtgtgtcttctcttactacagagtacagttgtgaatttggctccgcgaagtattat

SEQ ID NO: 2067 - DNA, 123 bp, Artificial Sequence
  Synthetic
cctcactcccctgtccccttgctccccgcctccaccctccacgccccaagccccgccccccacctgcctgctccctgtgccccctccacctgcctatcctgtgccatcctcctccttgcacgc

SEQ ID NO: 2068 - DNA, 123 bp, Artificial Sequence
  Synthetic
cagggctgcgcccagcgcttccggtgagtccgtggacggcggggatggggtccggcggcctccgggcccctctcaagccgcctcctccccctgcagggagcggcaggcgggcgggggcgcggc

SEQ ID NO: 2069 - DNA, 123 bp, Artificial Sequence
  Synthetic
aaagaaatgcacaatctcgcaaggtaaagaaaatattgtgctagacgtaatcttgggtaaatacctttttgcattaggataaaaaaatccatgctttcttttacattcatttatagaaataat

SEQ ID NO: 2070 - DNA, 123 bp, Artificial Sequence
  Synthetic
gcaactccagcccccgaacccaggtgagttgtctctgctttgtctccaaatcctgcaggcgggtccctggtcatcgaggggtaggacgaggtggccttgcaggggggagagcctgccttctct

SEQ ID NO: 2071 - DNA, 115 bp, Artificial Sequence
  Synthetic
tggagtgcactgaaggtagtgtaagtctttggtttgaaaccaaatctcctgcatgctagttactcttgggattggtggagtgcttttagcctactgagtgcagtgatggaaaaaa

SEQ ID NO: 2072 - DNA, 123 bp, Artificial Sequence
  Synthetic
gagcgctacctgttcgtgtacaggtgggtggtctagaaagccaggaagcccctccctcacctgggagggccccaacagagcagggaagtagtttgtcctattagtttgtcctatggcaagaac

SEQ ID NO: 2073 - DNA, 123 bp, Artificial Sequence
  Synthetic
cagcagccacctcgggagccatcctagaggtggggtcacagatgggatggccgggtgccctgctctgtggcccctacccctccgccccaggcgcagcctcaccagtagggagtcccaatgaaa

SEQ ID NO: 2074 - DNA, 123 bp, Artificial Sequence
  Synthetic
tgcatcagtctcagaccatggaggtactgtatcatctgccctttctttgttttctttgtgcaaatgatggggaatggtaaagcaattctctcctgtgtggattgttcacatgacaatcacaga

SEQ ID NO: 2075 - DNA, 123 bp, Artificial Sequence
  Synthetic
agtaatgcagtggacttgtagctgtcatttagcagcttttgttttcaggttcagagagctatattctgaaataccgagacttcttgaagactgacctctggagaagtaggcatattataaagt

SEQ ID NO: 2076 - DNA, 123 bp, Artificial Sequence
  Synthetic
caccatcacagcgaacacctcaggtctgactatgctgctctagtagtgtcttcagttatagataatgaaatggaaactcaaaactttaatgtagctcttttattttgtgccagatattatttg

SEQ ID NO: 2077 - DNA, 123 bp, Artificial Sequence
  Synthetic
tgattattaaattgaaaaattctctgtaaaataaaagagcagagagatctcctttttcacaagaggggaacttagacatgctgagaggcccatcaatggggactcatgggcctttgtttcctg

SEQ ID NO: 2078 - DNA, 123 bp, Artificial Sequence; identical to SEQ ID NO: 2042
  Synthetic

SEQ ID NO: 2079 - DNA, 123 bp, Artificial Sequence
  Synthetic
ctttggacattttttgttcactagtgagtatctgtattttttatttctctatgtactaaaaaaagcatttctctacataatgaactatttttttttctaggtggagtaatgtatataacgtaa
